(19) United States
(12) Patent Application Publication
(10) Pub. No.: US 2013/0197201 A1
(43) Pub. Date: Aug. 1, 2013

(54) ANTIBODY LIBRARIES

(71) Applicants: Maximiliano Vasquez, Palo Alto, CA (US); Arvind Sivasubramanian, Santa Clara, CA (US); Michael Feldhaus, Grantham, NH (US)

(72) Inventors: Maximiliano Vasquez, Palo Alto, CA (US); Arvind Sivasubramanian, Santa Clara, CA (US); Michael Feldhaus, Grantham, NH (US)

(73) Assignee: ADIMAB, LLC, Lebanon, NH (US)

(21) Appl. No.: 13/810,570

(22) PCT Filed: Jul. 14, 2011
(86) PCT No.: PCT/US11/44063

§ 371 Date: Apr. 1, 2013

Related U.S. Application Data
(60) Provisional application No. 61/365,194, filed on Jul. 16, 2010.

(51) Int. Cl. G01N 33/543

(52) U.S. Cl. CPC G01N 33/543
USPC 530/389.1; 506/17; 506/9; 435/320.1; 435/254.21; 506/24

(57) ABSTRACT

The present invention overcomes the inadequacies inherent in the known methods for generating libraries of antibody-encoding polynucleotides by specifically designing the libraries with directed sequence and length diversity.

### RELATED APPLICATION

[0001] This application claims priority to U.S. provisional application Ser. No. 61/365,194, filed on Jul. 16, 2010, incorporated herein in its entirety by this reference.

### BACKGROUND

[0002] Antibodies have profound relevance as research tools and in diagnostic and therapeutic applications. However, the identification of useful antibodies is difficult and once identified, antibodies often require considerable redesign or “humanization” before they are suitable for therapeutic applications in humans.

[0003] Many methods for identifying antibodies involve display of libraries of antibodies derived by amplification of nucleic acids from B cells or tissues. Some of these methods have utilized synthetic libraries. However, many of these approaches have limitations. For example, most human antibody libraries known in the art contain only the antibody sequence diversity that can be experimentally captured or cloned from a biological source (e.g., B cells). Accordingly, such libraries may over-represent some sequences, while completely lacking or under-representing other sequences, particularly those binding human antigens. Most synthetic libraries known in the art have other limitations, such as the occurrence of unnatural (i.e., non-human) amino acid sequence motifs that have the potential to be immunogenic.

[0004] Accordingly, a need exists for diverse antibody libraries that contain candidate antibodies that are non-immunogenic (i.e., are human) and have desired properties (e.g., the ability to recognize a broad variety of antigens). However, obtaining such libraries requires balancing the competing objectives of generating diverse libraries while still maintaining the human character of the sequences within the library. The current invention provides antibody libraries that have these and other desirable features, and methods of making and using such libraries.

### SUMMARY

[0005] The invention provides, among other things, improvements in the design and production of synthetic libraries that mimic the diversity of the natural human repertoire of CDRH3, CDRL3, heavy chain, light chain, and/or full-length (intact) antibody sequences. In some embodiments the invention defines and provides methods of generating theoretical segment pools of TN1, DH, N2, and H3-JH segments to consider for inclusion in a physical manifestation of a library (e.g., polynucleotide or polypeptide) comprising or encoding CDRH3 sequences (e.g., an antibody library). In certain embodiments the invention defines and provides methods of matching the individual members of these theoretical segment pools to a reference set of CDRH3 sequences, to determine the frequency of occurrence (or segment usage weight) of each of the segments in the theoretical segment pool in the reference set. While any set of CDRH3 sequences may be used as a reference set, the invention also defines and provides methods of generating particular reference sets or subsets of interest. For example, among other things, the present invention provides methods for filtering an original reference set to obtain a provided reference set with a preimmune character. Also provided are methods to define and/or identify segments that occur within the CDRH3 sequences in the reference set but not in the theoretical segment pool. Such segments can be added to a theoretical segment pool, for example in order to be considered for inclusion in a physical library. Although the frequency of occurrence of a particular segment in a reference set is useful to select segments for inclusion in a physical library, the invention also provides a number of physicochemical and biological properties that can be used (alone or together with any other criterion or criteria) to select segments for inclusion in a physical library.

[0006] In some embodiments the invention provides libraries that differ from certain other libraries known in the art in that they are not sitewise-stochastic in composition or sequence, and are therefore intrinsically less random than these certain other libraries of the art (see e.g., Example 14 of US Pub. No. 2009/0181855, incorporated by reference in its entirety, for a discussion of information content and randomness). In some embodiments, degenerate oligonucleotides may be used to further increase the diversity of the members of a library while further improving matching with a reference set of sequences (e.g., CDRH3, CDRL3, heavy chain, light chain, and/or full-length (intact) antibody sequences).

[0007] The invention also provides libraries whose members have sequences that are related to one another in that they would be selected for inclusion in a physical library by performing the analyses described herein, for example by generating a CDRH3 reference set as in Example 3; generating theoretical segment pools as in Examples 5-7; matching the members of a theoretical segment pool to the reference set as in Examples 4 and 8; and selecting members of the theoretical segment pool for inclusion in a physical library as in Examples 8-9. Also provided are methods of further increasing diversity in certain sequences by utilizing degenerate oligonucleotides as in Examples 12-16.

[0008] In some embodiments, the present invention provides polynucleotide and polypeptide libraries comprising CDRH3, CDRL3, heavy chain, light chain, and/or full-length (intact) antibody sequences, and methods of making and using such libraries.

[0009] In some embodiments, the invention provides libraries comprising, consisting essentially of, or consisting of any of the libraries or theoretical segment pools described herein.

[0010] In some embodiments, the present invention recognizes that by mimicking the in vivo activity of the enzyme TdT computationally, theoretical segment pools can be generated and subsequently matched to large reference datasets of CDR sequences to choose, for inclusion in a library, those theoretical segments that best recapitulate the CDR sequences in the reference data sets.

[0011] In certain embodiments, the invention provides libraries of polynucleotides comprising at least about 10⁴ polynucleotides encoding CDRH3 polypeptides with the structure: [TN1]-[DH]-[N2]-[H3-JH], wherein: TN1 is a polypeptide corresponding to any of the TN1 polypeptides of Tables 9-10 and 18-26, or a polypeptide produced by translation of any of the TN1 polynucleotides of Tables 25-26; DH is a polypeptide corresponding to any of the DH polypeptides of Tables 9, 11, 17-25 and 28, or a polypeptide produced by translation of any of the DH-encoding polynucleotides of Tables 16, 25 and 27; N2 is a polypeptide corresponding to any of the N2 polypeptides of Tables 9, 12, 18-25 and 30, or a polypeptide produced by translation of any of the N2-encoding polynucleotides of Tables 25 and 29; and H3-JH is a polypeptide corresponding to any of the H3-JH polypeptides of Tables 9, 13, 15, 18-25 and 32, or a polypeptide produced by translation of any of the H3-JH-encoding polynucleotides of Tables 14, 25 and 31.

[0012] In some embodiments, the invention provides libraries wherein at least about 1%, 5%, or 10% of the sequences in the library have the structure provided above, or that of any of the libraries provided herein.

[0013] In certain embodiments, the invention provides libraries comprising polynucleotides encoding CDRH3 polypeptides produced by the sets of TN1, DH, N2, and H3-JH polypeptides provided in any one of Tables 23-25.

[0014] In some embodiments, the invention provides libraries comprising polynucleotides encoding CDRH3 polypeptides produced by the set of TN1 polypeptides provided in Table 26, the set of DH polypeptides provided in Table 28, the set of N2 polypeptides provided in Table 30 and the set of H3-JH polypeptides provided in Table 32.

[0015] In certain embodiments, the invention provides libraries whose members show (or encode polypeptides that show) at least a certain percent identity with the polypeptides described above, for example, a library comprising at least about 10⁴ polynucleotides encoding CDRH3 polypeptides with the structure: [TN1]-[DH]-[N2]-[H3-JH], wherein: TN1 is a polypeptide at least about 80%, 90%, or 95% identical to any of the TN1 polypeptides of Tables 9-10 and 18-26, or a polypeptide at least about 80%, 90%, or 95% identical to a polypeptide produced by translation of any of the TN1 polynucleotides of Tables 25-26; DH is a polypeptide at least about 80%, 90%, or 95% identical to any of the DH polypeptides of Tables 9, 11, 17-25 and 28, or a polypeptide at least about 80%, 90%, or 95% identical to a polypeptide produced by translation of any of the DH-encoding polynucleotides of Tables 16, 25 and 27; N2 is a polypeptide at least about 80%, 90%, or 95% identical to any of the N2 polypeptides of Tables 9, 12, 18-25 and 30, or a polypeptide at least about 80%, 90%, or 95% identical to a polypeptide produced by translation of any of the N2-encoding polynucleotides of Tables 25 and 29; and H3-JH is a polypeptide at least about 80%, 90%, or 95% identical to any of the H3-JH polypeptides of Tables 9, 13, 15, 18-25 and 32, or a polypeptide at least about 80%, 90%, or 95% identical to a polypeptide produced by translation of any of the H3-JH-encoding polynucleotides of Tables 14, 25 and 31.

[0016] In some embodiments, the invention provides libraries comprising polynucleotides encoding light chain variable regions, wherein the light chain variable regions are selected from the group consisting of: (a) a VK1-05 sequence varied at one or more of positions 4, 49, and 46; (b) a VK1-12 sequence varied at one or more of positions 4, 49, 46, and 66; (c) a VK1-33 sequence varied at one or more of positions 4, 49, and 66; (d) a VK1-39 sequence varied at one or more of positions 4, 49, and 46; (e) a VK2-28 sequence varied at one or more of positions 2, 4, 46, and 49; (f) a VK3-11 sequence varied at one or more of positions 2, 4, 36, and 49; (g) a VK3-15 sequence varied at one or more of positions 2, 4, 48, and 49; (h) a VK3-20 sequence varied at one or more of positions 2, 4, 48, and 49; and/or (i) a VK4-1 sequence varied at one or more of positions 4, 46, 49, and 66.

[0017] In certain embodiments, the invention provides libraries comprising polynucleotides encoding light chain variable regions that comprise polypeptide sequences at least about 80%, 90%, or 95% identical to two or more of the light chain polypeptide sequences provided in Table 3.

[0018] In some embodiments, the invention provides libraries wherein the light chain variable regions comprise the polypeptide sequences provided in Table 3.

[0019] In certain embodiments, the invention provides libraries comprising polynucleotides encoding light chain variable regions, wherein the L3-VL polypeptide sequences of the light chain variable regions are varied at two or three residues between positions 89 to 94, inclusive, in comparison to an L3-VL germline sequence. In some embodiments, libraries containing a single light chain germline sequence and its variants are provided. In certain embodiments, variants produced from different light chain germline sequences can be combined to produce libraries encoding multiple light chain germline sequences and their variants. Any of the light chain L3-VL germline sequences provided herein may be varied at two or three residues between positions 89 to 94, inclusive, and one of ordinary skill in the art will recognize that any other L3-VL sequence can also be varied according to the principles described herein to produce libraries provided by the invention. In some embodiments, the present invention comprises libraries containing polynucleotides that encode antibody light chain variable regions, wherein the antibody light chain variable regions comprise one or more of the following L3-VL sequences: (i) an amino acid sequence that is identical to an L3-VL germline sequence (e.g., see Table 1); (ii) an amino acid sequence that contains two substitutions between residues 89-94, inclusive, in comparison to an L3-VL germline sequence; and (iii) an amino acid sequence that contains three substitutions between residues 89-94, inclusive, in comparison to an L3-VL germline sequence. In some embodiments, each antibody light chain variable region on a library includes one or more of the above L3-VL sequences. In some embodiments, such a library is combined with one or more sets of other nucleic acids that may or may not encode antibody light chain variable regions, and may or may not contain such L3-VL sequences. In some embodiments, the present invention comprises libraries containing polynucleotides that encode an antibody light chain variable region having an amino acid sequence as set forth in Table 4, or a polynucleotide sequence as set forth in one or more of Tables 5-7, wherein two or three residues at positions 89-94, inclusive, are varied.

[0020] In some embodiments, the present invention comprises libraries containing polynucleotides that encode an antibody light chain variable region, wherein, across the library, all encoded antibody light chain variable regions are identical to one another except for substitutions of residues at positions between residue 89 and residue 94, inclusive and further wherein, across the library, sequences of any two encoded antibody light chain variable regions differ from one another at not more than 3 positions.

[0021] In some embodiments, the invention provides libraries comprising polynucleotides encoding light chain variable regions comprising polypeptide sequences at least about 80%, 90%, or 95% identical to polypeptides produced by translation of two or more of the polynucleotide sequences provided in Tables 5-7. In certain embodiments all members of the library are at least about 80%, 90%, or 95% identical to polypeptides produced by translation of two or more of the polynucleotide sequences provided in Tables 5-7.

[0022] In certain embodiments, the invention provides a library comprising light chain variable regions that comprise the polypeptides produced by translation of the polynucleotide sequences provided in Tables 5-7. In certain embodiments, all members of the library comprise the polypeptides produced by translation of the polynucleotide sequences provided in Tables 5-7.

[0023] In some embodiments, any of the libraries described herein as containing or encoding CDRL3 and/or light chain variable regions, contains or encodes such CDRL3 and/or light chain variable regions in the context of complete light chains. Furthermore, in some embodiments, such libraries (and/or complete light chain libraries) further contain or encode one or more heavy chain CDRH3, variable domains, or intact heavy chains. In some embodiments, provided libraries include or encode intact antibodies such as, for example, intact IgGs.

[0024] In some embodiments, provided libraries include or encode human antibodies or antibody fragments; in some such embodiments, provided libraries include or encode intact human antibodies.

[0025] In certain embodiments, the invention provides libraries that comprise nucleic acid vectors containing library nucleic acids described herein. In many embodiments, each such library member comprises the same vector.

[0026] In some embodiments, the invention provides host cells containing one or more provided libraries, for example including a vector. In some embodiments the host cell is a yeast, and in certain embodiments the yeast is Saccharomyces cerevisiae.

[0027] In some embodiments, the invention provides antibodies isolated from the libraries described herein.

[0028] In certain embodiments, the invention provides kits containing any of the libraries described herein.

[0029] In some embodiments, the invention provides representations of libraries and/or theoretical segment pools in a computer readable format, for example, the TN1 polypeptides of Tables 10, 23-25 and 26; the DH polypeptides of Tables 11, 23-25 and 28; the N2 polypeptides of Tables 12, 23-25 and 30; the H3-JH polypeptides of Tables 13, 15, 17, 23-25 and 32; the TN1 polynucleotides of Tables 25-26; the DH polynucleotides of Tables 25 and 27; the N2 polynucleotides of Tables 25 and 29; and/or the H3-JH polynucleotides of Tables 25 and 31.

[0030] In certain embodiments, the invention provides a representation of the polynucleotide sequences of the Human Preimmune Set (Appendix A), or the polypeptide expression products thereof, in a computer readable format.

[0031] In some embodiments, the invention provides a method of making synthetic polynucleotides encoding a CDRH3 library, comprising: (a) providing a theoretical segment pool containing TN1, DH, N2, and H3-JH segments; (b) providing a reference set of CDRH3 sequences; (c) utilizing the theoretical segment pool of (a) to identify the closest match(es) to each CDRH3 sequence in the reference set of (b); (d) selecting segments from the theoretical segment pool for inclusion in a synthetic library; and (e) synthesizing the synthetic CDRH3 library. In certain embodiments, the invention provides libraries made by this method. In some embodiments, the segments selected for inclusion in the synthetic library are selected according to their segment usage weight in the reference set of CDRH3 sequences.

[0032] In certain embodiments, the invention provides a method of making synthetic polynucleotides encoding a CDRL3 library, comprising: (i) obtaining a reference set of light chain sequences, wherein the reference set contains light chain sequences with VL segments originating from the same IGVL germline gene and/or its allelic variants; (ii) determining which amino acids occur at each of the CDRL3 positions in the reference set that are encoded by the IGVL gene; (iii) synthesizing light chain variable domain encoding sequences wherein two positions between positions 89 and 94, inclusive, contain degenerate codons encoding two or more of the five most frequently occurring amino acid residues at the corresponding positions in the reference set; and (iv) synthesizing the polynucleotides encoding the CDRL3 library. In certain embodiments, the invention provides libraries made by this method.

[0033] In some embodiments, the invention provides a method of using any of the libraries of the invention to isolate an antibody binding an antigen, comprising contacting the polypeptide expression products of said libraries with an antigen and isolating polypeptide expression products that bind to the antigen.

[0034] In certain embodiments, the number of N-linked glycosylation sites, deamidation motifs, and/or Cys residues in the libraries of the invention are reduced or eliminated in comparison to libraries produced by amplification of a repertoire from a biological source.

[0035] The invention provides a number of polynucleotide and polypeptide sequences and segments that can be used to build larger polynucleotide and polypeptide sequences (e.g., TN1, DH, N2, and H3-JH segments that can be used to build CDRH3). One of ordinary skill in the art will readily recognize that in some instances these sequences can be more succinctly represented by providing consensus sequences after alignment of the sequences provided by the invention, and that these consensus sequences fall within the scope of the invention and may be used to more succinctly represent any of the sequences provided herein.

### BRIEF DESCRIPTION OF THE DRAWING

[0036] FIG. 1 shows that Vernier residues 4 and 49 (starred) in VK1-39 have a diversity index comparable to or greater than the diversity indices of the CDR positions (i.e., at or above 0.07, in this example).

[0037] FIG. 2 shows that clinically validated CDRL3 sequences deviate little from germline-like sequences (n=35).

[0038] FIG. 3 shows the percent of sequences in the jumping dimer CDRL3 libraries of the invention and a previous CDRL3 library, VK-v1.0, with X or fewer mutations from germline. Here, FX is the percentage of sequences in a library with X or fewer mutations from germline.

[0039] FIG. 4 shows the application of a provided method used to generate nucleotide sequences encoding the parent H3-JH segments.

[0040] FIG. 5 shows the general schematic of an approach used to select segments from a theoretical segment pool for inclusion in a theoretical and/or synthetic library.

[0041] FIG. 6 shows the frequency of “Good” and “Poor” expressing CDRH3 sequences isolated from yeast-based libraries described in US 2009/0181855, and their comparison to the sequences contained in the library design described therein (“Design”), as a function of the DH segment hydrophobicity (increasing to the right).

[0042] FIG. 7 shows the percentage of CDRH3 sequences in the LUA-141 library and Exemplary Library Design 3 (ELD-3) that match CDRH3 sequences from Lee-666 and Boyd-3000 with zero, one, two, three, or more than three amino acid mismatches.

[0043] FIG. 8 shows that Exemplary Library Design 3 (ELD-3) and the Extended Diversity Library Design both return better matches to clinically relevant CDRH3 sequences than the LUA-141 library.

[0044] FIG. 9 shows that the combinatorial efficiency of Exemplary Library Design 3 (ELD-3) is greater than that of the LUA-141 library. Specifically, the ELD-3 segments are more likely to yield a unique CDRH3 than the LUA-141 library segments.

[0045] FIG. 10 shows the amino acid compositions of the Kabat-CDRH3s of LUA-141, Exemplary Library Design 3 (ELD-3), and Human CDRH3 sequences from the HPS (Human H3).

[0046] FIG. 11 shows the Kabat-CDRH3 length distribution of LUA-141, Exemplary Library Design 3 (ELD-3), and Human CDRH3 sequences from the HPS (Human H3).

[0047] FIG. 12 shows the percentage of CDRH3 sequences in the Extended Diversity library that match CDRH3 sequences from Boyd et al. with zero to thirty-two amino acid mismatches

[0048] FIG. 13 shows the Kabat-CDRH3 length distribution of Exemplary Library Design 3 (“ELD-3”), the Extended Diversity Library Design (“Extended Diversity”) and human CDRH3 sequences from the Boyd et al. data set (“Boyd 2009”).

[0049] FIG. 14 shows the amino acid compositions of the Kabat-CDRH3s of the Extended Diversity Library Design (“Extended Diversity”) and human CDRH3 sequences from the Boyd et al. dataset (“Boyd 2009”).

[0050] FIG. 15 shows the combinatorial efficiency of the Extended Diversity Library Design by matching 20,000 randomly selected sequences from the (same) design. About 65% of the sequences appear only once in the design and about 17% appear twice.

### DETAILED DESCRIPTION OF CERTAIN EMBODIMENTS OF THE INVENTION

[0051] The present invention provides, among other things, polynucleotide and polypeptide libraries, methods of producing and using the libraries, kits containing the libraries, and computer readable forms of representations of libraries and/or theoretical segment pools disclosed herein. Libraries taught in this application can be described, at least in part, in terms of components (e.g., polynucleotide or polypeptide “segments”) from which they are assembled. Among other things, the present invention specifically provides and contemplates these polynucleotide or polypeptide segments, methods of producing and using such segments, and kits and computer readable forms of representations that include such library segments.

[0052] In certain embodiments, the invention provides antibody libraries specifically designed based on sequences and CDR length distribution in a naturally occurring human antibody repertoire. It is estimated that, even in the absence of antigenic stimulation, an individual human makes at least about 10⁷ different antibody molecules (Boyd et al., Science Translational Medicine, 2009, 1: 1). The antigen-binding sites of many antibodies can cross-react with a variety of related but different epitopes. In addition, the human antibody repertoire is large enough to ensure that there is an antigen-binding site to fit almost any potential epitope, albeit potentially with low affinity.

[0053] The mammalian immune system has evolved unique genetic mechanisms that enable it to generate an almost unlimited number of different light and heavy chains in a remarkably economical way, by combinatorially joining chromosomally separated gene segments prior to transcription. Each type of immunoglobulin (Ig) chain (i.e., kappa light, lambda light, and heavy) is synthesized by combinatorial assembly of DNA sequences, selected from two or more families of gene segments, to produce a single polypeptide chain. Specifically, the heavy chains and light chains each consist of a variable region and a constant (C) region. The variable regions of the heavy chains are encoded by DNA sequences assembled from three families of gene sequences: variable (IGHV), diversity (IGHD), and joining (IGHJ). The variable regions of light chains are encoded by DNA sequences assembled from two families of gene sequences for each of the kappa and lambda light chains: variable (IGLV) and joining (IGLJ). Each variable region (heavy and light) is also recombined with a constant region, to produce a full-length immunoglobulin chain.

[0054] While combinatorial assembly of the V, D and J gene segments make a substantial contribution to antibody variable region diversity, further diversity is introduced in vivo, at the pre-B cell stage, via imprecise joining of these gene segments and the introduction of non-templated nucleotides at the junctions between the gene segments (see e.g., U.S. Pub. No. 2009/0181855, which is incorporated by reference in its entirety, for more information).

[0055] After a B cell recognizes an antigen, it is induced to proliferate. During proliferation, the B cell receptor locus undergoes an extremely high rate of somatic mutation that is far greater than the normal rate of genomic mutation. The mutations that occur are primarily localized to the Ig variable regions and comprise substitutions, insertions and deletions. This somatic hypermutation enables the production of B cells that express antibodies possessing enhanced affinity toward an antigen. Such antigen-driven somatic hypermutation fine-tunes antibody responses to a given antigen.

[0056] Synthetic antibody libraries of the instant invention have the potential to recognize any antigen, including antigens of human origin. The ability to recognize antigens of human origin may not be present in other antibody libraries, such as antibody libraries prepared from human biological sources (e.g., from human cDNA), because self-reactive antibodies are removed by the donor's immune system via negative selection.

[0057] Still further, the present invention provides strategies that streamline and/or simplify certain aspects of library development and/or screening. For example, in some embodiments, the present invention permits use of cell sorting technologies (e.g., fluorescence activated cell sorting, FACS) to identify positive clones, and therefore bypasses or obviates the need for the standard and tedious methodology of generating a hybridoma library and supernatant screening.

[0058] Yet further, in some embodiments, the present invention provides libraries and/or sublibraries that accommodate multiple screening passes. For example, in some embodiments, provided libraries and/or sublibraries can be screened multiple times. In some such embodiments, individual provided libraries and/or sublibraries can be used to discover additional antibodies against many targets.

[0059] Before further description of the invention, certain terms are defined.

### DEFINITIONS

[0060] Unless defined otherwise, all technical and scientific terms used herein have the meaning commonly understood by one of ordinary skill in the art relevant to the invention. Unless otherwise specified, the Kabat numbering system is used throughout the application. The definitions below supplement those in the art and are directed to the embodiments described in the current application.

[0061] The term “amino acid” or “amino acid residue,” as would be understood by one of ordinary skill in the art, typically refers to an amino acid having its art recognized definition such as an amino acid selected from the group consisting of: alanine (Ala or A); arginine (Arg or R); asparagine (Asn or N); aspartic acid (Asp or D); cysteine (Cys or C); glutamine (Gln or Q); glutamic acid (Glu or E); glycine (Gly or G); histidine (H is or H); isoleucine (Ile or I): leucine (Leu or L); lysine (Lys or K); methionine (Met or M); phenylalanine (Phe or F); proline (Pro or P); serine (Ser or S); threonine (Thr or T); tryptophan (Trp or W); tyrosine (Tyr or Y); and valine (Val or V), although modified, synthetic, or rare amino acids may be used as desired. Generally, amino acids can be grouped as having a non-polar side chain (e.g., Ala, Cys, Ile, Leu, Met, Phe, Pro, Val); a negatively charged side chain (e.g., Asp, Glu); a positively charged side chain (e.g., Arg, His, Lys); or an uncharged polar side chain (e.g., Asn, Cys, Gln, Gly, His, Met, Phe, Ser, Thr, Trp, and Tyr).

[0062] As would be understood by those of ordinary skill in the art, the term “antibody” is used herein in the broadest sense and specifically encompasses at least monoclonal antibodies, polyclonal antibodies, multi-specific antibodies (e.g., bispecific antibodies), chimeric antibodies, humanized antibodies, human antibodies, and antibody fragments. An antibody is a protein comprising one or more polypeptides substantially or partially encoded by immunoglobulin genes or fragments of immunoglobulin genes. The recognized immunoglobulin genes include the kappa, lambda, alpha, gamma, delta, epsilon and mu constant region genes, as well as myriad immunoglobulin variable region genes.

[0063] The term “antibody binding region” refers to one or more portions of an immunoglobulin or antibody variable region capable of binding an antigen(s). Typically, the antibody binding region is, for example, an antibody light chain (or variable region or one or more CDRs thereof), an antibody heavy chain (or variable region or one or more CDRs thereof), a heavy chain Fd region, a combined antibody light and heavy chain (or variable regions thereof) such as a Fab, F(ab′)₂, single domain, or single chain antibodies (scFv), or any region of a full length antibody that recognizes an antigen, for example, an IgG (e.g., an IgG1, IgG2, IgG3, or IgG4 subtype), IgA1, IgA2, IgD, IgE, or IgM antibody.

[0064] “Antibody fragments” comprise a portion of an intact antibody, for example, one or more portions of the antigen-binding region thereof. Examples of antibody fragments include Fab, Fab′, F(ab′)₂, and Fv fragments, diabodies, linear antibodies, single-chain antibodies, and multi-specific antibodies formed from intact antibodies and antibody fragments.

[0065] The term “antibody of interest” refers to an antibody that has a property of interest that is identified and/or isolated from a library of the invention. Exemplary properties of interest include, for example, but are not limited to, binding to a particular antigen or epitope, binding with a certain affinity, cross-reactivity, blocking a binding interaction between two molecules, and/or eliciting a certain biological effect.

[0066] The term “canonical structure,” as understood by those of ordinary skill in the art, refers to the main chain conformation that is adopted by the antigen binding (CDR) loops. From comparative structural studies, it has been found that five of the six antigen binding loops have only a limited repertoire of available conformations. Each canonical structure can be characterized by the torsion angles of the polypeptide backbone. Correspondent loops between antibodies may, therefore, have very similar three dimensional structures, despite high amino acid sequence variability in most parts of the loops (Chothia and Lesk, J. Mol. Biol., 1987, 196: 901; Chothia et al., Nature, 1989, 342: 877; Martin and Thornton, J. Mol. Biol., 1996, 263: 800, each of which is incorporated by reference in its entirety). Furthermore, there is a relationship between the adopted loop structure and the amino acid sequences surrounding it. As is known in the art, the conformation of a particular canonical class is determined by the length of the loop and the amino acid residues residing at key positions within the loop, as well as within the conserved framework (i.e., outside of the loop). Assignment to a particular canonical class can therefore be made based on the presence of these key amino acid residues. The term “canonical structure” may also include considerations as to the linear sequence of the antibody, for example, as catalogued by Kabat (Kabat et al., in “Sequences of Proteins of Immunological Interest,” 5^{th} Edition, U.S. Department of Heath and Human Services, 1992). The Kabat numbering scheme is a widely adopted standard for numbering the amino acid residues of an antibody variable domain in a consistent manner, and is used herein unless indicated otherwise. Additional structural considerations can also be used to determine the canonical structure of an antibody. For example, those differences not fully reflected by Kabat numbering can be described by the numbering system of Chothia et al. and/or revealed by other techniques, for example, crystallography and two or three-dimensional computational modeling. Accordingly, a given antibody sequence may be placed into a canonical class which allows for, among other things, identifying appropriate chassis sequences (e.g., based on a desire to include a variety of canonical structures in a library). Kabat numbering of antibody amino acid sequences and structural considerations as described by Chothia et al., and their implications for construing canonical aspects of antibody structure, are described in the literature.

[0067] The terms “CDR”, and its plural “CDRs”, refer to a complementarity determining region (CDR) of which three make up the binding character of a light chain variable region (CDRL1, CDRL2 and CDRL3) and three make up the binding character of a heavy chain variable region (CDRH1, CDRH2 and CDRH3). CDRs contribute to the functional activity of an antibody molecule and are separated by amino acid sequences that comprise framework regions. The exact definitional CDR boundaries and lengths are subject to different classification and numbering systems. CDRs may therefore be referred to by Kabat, Chothia, contact or other boundary definitions, including for example the CDRH3 numbering system described below. Despite differing boundaries, each of these systems has some degree of overlap in what constitutes the so called “hypervariable regions” within the variable region. CDR definitions according to these systems may therefore differ in length and boundary areas with respect to the adjacent framework region. See, for example Kabat et al., in “Sequences of Proteins of Immunological Interest,” 5^{th} Edition, U.S. Department of Health and Human Services, 1992; Chothia et al., J. Mol. Biol., 1987, 196: 901; and MacCallum et al., J. Mol. Biol., 1996, 262: 732, each of which is incorporated by reference in its entirety.

[0068] The “CDRH3 numbering system” used herein defines the first amino acid of CDRH3 as being at position 95 and the last amino acid of CDRH3 as position 102. Note that this is a custom numbering system that is not according to Kabat. The amino acid segment, beginning at position 95 is called “TN1” and, when present, is assigned numbers 95, 96, 96A, 96B, etc. Note that the nomenclature used in the current application is slightly different from that used in U.S. Publication Nos. 2009/0181855 and 2010/0056386, and WO/2009/036379. In those applications, position 95 was designated a “Tail” residue, while here, the Tail (T) has been combined with the N1 segment, to produce one segment, designated “TN1.” The TN1 segment is followed by the “DH” segment, which is assigned numbers 97, 97A, 97B, 97C, etc. The DH segment is followed by the “N2” segment, which, when present, is numbered 98, 98A, 98B, etc. Finally, the most C-terminal amino acid residue of the “H3-JH” segment is designated as number 102. The residue directly before (N-terminal) it, when present, is 101, and the one before (if present) is 100. The rest of the H3-JH amino acids are numbered in reverse order, beginning with 99 for the amino acid just N-terminal to 100, 99A for the residue N-terminal to 99, and so forth for 99B, 99C, etc. Examples of CDRH3 sequence residue numbers may therefore include the following:

[chemical structure]

[0069] “Chassis” of the invention are portions of the antibody heavy chain variable (IGHV) or light chain variable (IGLV) domains that are not part of CDRH3 or CDRL3, respectively. A chassis of the invention is defined as the portion of the variable region of an antibody beginning with the first amino acid of FRM1 and ending with the last amino acid of FRM3. In the case of the heavy chain, the chassis includes the amino acids including from position 1 to position 94. In the case of the light chains (kappa and lambda), the chassis are defined as including from position 1 to position 88. The chassis of the invention may contain certain modifications relative to the corresponding germline variable domain sequences. These modifications may be engineered (e.g., to remove N-linked glycosylation sites) or naturally occurring (e.g., to account for naturally occurring allelic variation). For example, it is known in the art that the immunoglobulin gene repertoire is polymorphic (Wang et al., Immunol. Cell. Biol., 2008, 86: 111; Collins et al., Immunogenetics, 2008, 60: 669, each incorporated by reference in its entirety); chassis, CDRs and constant regions representative of these allelic variants are also encompassed by the invention. In some embodiments, the allelic variant(s) used in a particular embodiment of the invention may be selected based on the allelic variation present in different patient populations, for example, to identify antibodies that are non-immunogenic in these patient populations. In certain embodiments, the immunogenicity of an antibody of the invention may depend on allelic variation in the major histocompatibility complex (MHC) genes of a patient population. Such allelic variation may also be considered in the design of libraries of the invention. In certain embodiments of the invention, the chassis and constant regions are contained in a vector, and a CDR3 region is introduced between them via homologous recombination.

[0070] As used herein, a sequence designed with “directed diversity” has been specifically designed to contain both sequence diversity and length diversity. Directed diversity is not stochastic.

[0071] As used herein, the term “diversity” refers to a variety or a noticeable heterogeneity. The term “sequence diversity” refers to a variety of sequences which are collectively representative of several possibilities of sequences, for example, those found in natural human antibodies. For example, CDRH3 sequence diversity may refer to a variety of possibilities of combining the known human TN1, DH, N2, and H3-JH segments to form CDRH3 sequences. The CDRL3 sequence diversity (kappa or lambda) may refer to a variety of possibilities of combining the naturally occurring light chain variable region contributing to CDRL3 (i.e., “L3-VL”) and joining (i.e., “L3-JL”) segments, to form CDRL3 sequences. As used herein, “H3-JH” refers to the portion of the IGHJ gene contributing to CDRH3. As used herein, “L3-VL” and “L3-JL” refer to the portions of the IGLV and IGLJ genes (kappa or lambda) contributing to CDRL3, respectively.

[0072] As used herein, the term “expression” refers to steps involved in the production of a polypeptide including, but not limited to, transcription, post-transcriptional modification, translation, post-translational modification, and secretion.

[0073] The term “framework region” refers to the art-recognized portions of an antibody variable region that exist between the more divergent (i.e., hypervariable) CDRs. Such framework regions are typically referred to as frameworks 1 through 4 (FRM1, FRM2, FRM3, and FRM4) and provide a scaffold for the presentation of the six CDRs (three from the heavy chain and three from the light chain) in three dimensional space, to form an antigen-binding surface.

[0074] The term “full-length heavy chain” refers to an immunoglobulin heavy chain that contains each of the canonical structural domains of an immunoglobulin heavy chain, including the four framework regions, the three CDRs, and the constant region.

[0075] The term “full-length light chain” refers to an immunoglobulin light chain that contains each of the canonical structural domains of an immunoglobulin light chain, including the four framework regions, the three CDRs, and the constant region.

[0076] The term “germline-like,” when used with respect to the CDRL3 sequences of the light chains of the invention, means those sequences consisting of combinations of: (i) the first six wild-type residues contributed to CDRL3 by the IGVL germline gene (i.e., positions 89 to 94 in the Kabat numbering system; “L” is kappa or lambda); and (ii) one of several amino acid sequences, two one to four amino acids in length, largely, but not exclusively, derived from the JL segment (“L,” again is kappa or lambda). For kappa CDRL3 sequences of the most common lengths (i.e., 8, 9, and 10 residues), the sequences of (ii) number twenty and are: FT, LT, IT, RT, WT, YT, [X]T, [X]PT, [X]FT, [X]LT, [X]IT, [X]RT, [X]WT, [X]YT, [X]PFT, [X]PLT, [X]PIT, [X]PRT, [X]PWT and [X]PYT, where [X]corresponds to the amino acid residue found at position 95 (Kabat) in the respective VK germline sequence. X is most commonly P, but may also be S or any other amino acid residue found at position 95 of a VK germline sequence. For eight exemplified VK chassis exemplified herein, the corresponding 160 germline-like sequences, (i.e., 20 sequences of two to four amino acids in length combined with positions 89 to 94 of each of eight VK germline sequences) are provided in Table 1. A similar approach is applied to define germline-like CDRL3 sequences for lambda light chains. As for the kappa sequences described above, the intact, un-mutated portions of CDRL3 encoded by the IGVL genes (in this case, IGVλ) would be combined with the sequences largely, but not exclusively, derived from the Jλ segment. Here, the latter sequences (corresponding to (ii), above), number five and are: YV, VV, WV, AV or V. In addition, and as described in Example 7 of US 2009/0818155, one could further allow for variation at the last position of the Vλ-gene-encoded portion of CDRL3 by considering partial codons, while still considering the resulting sequences “germline-like.” More specifically, the entire “minimalist library” of Example 7 in US 2009/0818155 would be defined as “germline-like.” One of ordinary skill in the art will readily recognize that these methods can be extended to other VK and Vλ sequences.

[0077] The term “genotype-phenotype linkage,” as understood by those of ordinary skill in the art, refers to the fact that the nucleic acid (genotype) encoding a protein with a particular phenotype (e.g., binding an antigen) can be isolated from a library. For the purposes of illustration, an antibody fragment expressed on the surface of a phage can be isolated based on its binding to an antigen (e.g., U.S. Pat. No. 5,837,500). The binding of the antibody to the antigen simultaneously enables the isolation of the phage containing the nucleic acid encoding the antibody fragment. Thus, the phenotype (antigen-binding characteristics of the antibody fragment) has been “linked” to the genotype (nucleic acid encoding the antibody fragment). Other methods of maintaining a genotype-phenotype linkage include those of Wittrup et al. (U.S. Pat. Nos. 6,300,065, 6,331,391, 6,423,538, 6,696,251, 6,699,658, and U.S. Pub. No. 20040146976, each of which is incorporated by reference in its entirety), Miltenyi (U.S. Pat. No. 7,166,423, incorporated by reference in its entirety), Fandl (U.S. Pat. No. 6,919,183, US Pub No. 20060234311, each incorporated by reference in its entirety), Clausell-Tormos et al. (Chem. Biol., 2008, 15: 427, incorporated by reference in its entirety), Love et al. (Nat. Biotechnol., 2006, 24: 703, incorporated by reference in its entirety), and Kelly et al. (Chem. Commun., 2007, 14: 1773, incorporated by reference in its entirety). The term can be used to refer to any method which localizes an antibody protein together with the gene encoding the antibody protein, in a way in which they can both be recovered while the linkage between them is maintained.

[0078] The term “heterologous moiety” is used herein to indicate the addition of a moiety to an antibody wherein the moiety is not part of a naturally-occurring antibody. Exemplary heterologous moieties include drugs, toxins, imaging agents, and any other compositions which might provide an activity that is not inherent in the antibody itself.

[0079] As used herein, the term “host cell” is intended to refer to a cell comprising a polynucleotide of the invention. It should be understood that such terms refer not only to the particular subject cell but to the progeny or potential progeny of such a cell. Because certain modifications may occur in succeeding generations due to either mutation or environmental influences, such progeny may not, in fact, be identical to the parent cell, but are still included within the scope of the term as used herein.

[0080] As used herein, the term “human antibody CDR library” includes at least a polynucleotide or polypeptide library which has been designed to represent the sequence diversity and length diversity of naturally occurring CDRs in human antibodies (e.g., the term “CDR” in “human antibody CDR library” may be substituted with “CDRL1,” “CDRL2,” “CDRL3,” “CDRH1,” “CDRH2,” and/or “CDRH3”). Known human CDR sequences are represented in various data sets, including Jackson et al., J. Immunol. Methods, 2007, 324: 26; Martin, Proteins, 1996, 25: 130; Lee et al., Immunogenetics, 2006, 57: 917, Boyd et al., Science Translational Medicine, 2009, 1: 1, and WO/2009/036379, each of which is incorporated by reference in its entirety, and the HPS, which is provided in Appendix A.

[0081] The term “Human Preimmune Set,” or “HPS,” refers to a reference set of 3,571 curated human preimmune heavy chain sequences corresponding to the GI Nos. provided in Appendix A.

[0082] An “intact antibody” is one comprising full-length heavy- and light-chains (i.e., four frameworks, three CDRs, and a constant region for each of the heavy and light chains). An intact antibody is also referred to as a “full-length” antibody.

[0083] The term “length diversity” refers to a variety in the length of a family of nucleotide or amino acid sequence. For example, in naturally occurring human antibodies, the heavy chain CDR3 sequence varies in length, for example, from about 2 amino acids to over about 35 amino acids, and the light chain CDR3 sequence varies in length, for example, from about 5 to about 16 amino acids.

[0084] The term “library” refers to a set of entities comprising two or more entities having diversity as described herein, and/or designed according to the methods of the invention. For example, a “library of polynucleotides” refers to a set of polynucleotides comprising two or more polynucleotides having diversity as described herein, and/or designed according to the methods of the invention. A “library of polypeptides” refers to a set of polypeptides comprising two or more polypeptides having diversity as described herein, and/or designed according to the methods of the invention. A “library of synthetic polynucleotides” refers to a set of polynucleotides comprising two or more synthetic polynucleotides having diversity as described herein, and/or designed according to the methods of the invention. Libraries where all members are synthetic are also encompassed by the invention. A “human antibody library” refers to a set of polypeptides comprising two or more polypeptides having diversity as described herein, and/or designed according to the methods of the invention, for example a library designed to represent the sequence diversity and length diversity of naturally occurring human antibodies. In some embodiments, the term “library” may refer to a set of entities sharing similar structural or sequence characteristics, for example, a “heavy chain library,” “light chain library,” “antibody library,” and/or “CDRH3 library.”

[0085] The term “physical realization” refers to a portion of a theoretical (e.g., computer-based) or synthetic (e.g., oligonucleotide-based) diversity that can actually be physically sampled, for example, by any display methodology. Exemplary display methodology include: phage display, ribosomal display, and yeast display. For synthetic sequences, the size of the physical realization of a library depends on (1) the fraction of the theoretical diversity that can actually be synthesized, and (2) the limitations of the particular screening method. Exemplary limitations of screening methods include the number of variants that can be screened in a particular assay (e.g., ribosome display, phage display, yeast display) and the transformation efficiency of the host cells (e.g., yeast, mammalian cells, bacteria) which are used in a screening assay. For the purposes of illustration, given a library with a theoretical diversity of 10¹² members, an exemplary physical realization of the library (e.g., in yeast, bacterial cells, or ribosome display) that can maximally include 10¹¹ members will, therefore, sample about 10% of the theoretical diversity of the library. However, if fewer than 10¹¹ members of the library with a theoretical diversity of 10¹² are synthesized, and the physical realization of the library can maximally include 10¹¹ members, less than 10% of the theoretical diversity of the library is sampled in the physical realization of the library. Similarly, a physical realization of the library that can maximally include more than 10¹² members would “oversample” the theoretical diversity, meaning that each member may be present more than once (assuming that the entire 10¹² theoretical diversity is synthesized).

[0086] The term “polynucleotide(s)” refers to nucleic acids such as DNA molecules and RNA molecules and analogs thereof (e.g., DNA or RNA generated using nucleotide analogs or using nucleic acid chemistry). As desired, the polynucleotides may be made synthetically, e.g., using art-recognized nucleic acid chemistry or enzymatically using, e.g., a polymerase, and, if desired, be modified. Typical modifications include methylation, biotinylation, and other art-known modifications. In addition, the nucleic acid molecule can be single-stranded or double-stranded and, where desired, linked to a detectable moiety. The representation of nucleotide bases herein follows International Union of Pure and Applied Chemistry (IUPAC) nomenclature (see U.S. Pub. No. 2009/0181855, incorporated by reference in its entirety).

[0087] “Preimmune” antibody libraries have sequence diversities and length diversities similar to naturally occurring human antibody sequences before these sequences have undergone negative selection and/or somatic hypermutation. For example, the set of sequences described in Lee et al. (Immunogenetics, 2006, 57: 917, incorporated by reference in its entirety) and the Human Preimmune Set (HPS) described herein (see Appendix A) are believed to represent sequences from the preimmune repertoire. In certain embodiments of the invention, the sequences of the invention will be similar to these sequences (e.g., in terms of composition and length).

[0088] As used herein, the term “sitewise stochastic” describes a process of generating a sequence of amino acids, where only the amino acid occurrences at the individual positions are considered, and higher order motifs (e.g., pair-wise correlations) are not accounted for (e.g., see Knappik, et al., J Mol Biol, 2000, 296: 57, and analysis provided in U.S. Publication No. 2009/0181855, each incorporated by reference in its entirety).

[0089] The term “split-pool synthesis” refers to a procedure in which the products of a plurality of individual first reactions are combined (pooled) and then separated (split) before participating in a plurality of second reactions. For example, U.S. Publication No. 2009/0181855 (incorporated by reference in its entirety) describes the synthesis of 278 DH segments (products), each in a separate reaction. After synthesis, these 278 segments are combined (pooled) and then distributed (split) amongst 141 columns for the synthesis of the N2 segments. This enables the pairing of each of the 278 DH segments with each of 141 N2 segments.

[0090] As used herein, “stochastic” describes a process of generating a random sequence of nucleotides or amino acids, which is considered as a sample of one element from a probability distribution (e.g., see U.S. Pat. No. 5,723,323).

[0091] As used herein, the term “synthetic polynucleotide” refers to a molecule formed through a chemical process, as opposed to molecules of natural origin, or molecules derived via template-based amplification of molecules of natural origin (e.g., immunoglobulin chains cloned from populations of B cells via PCR amplification are not “synthetic” as used herein). In some instances, for example, when referring to libraries of the invention that comprise multiple segments (e.g., TN1, DH, N2, and/or H3-JH), the invention encompasses libraries in which at least one, two, three, or four of the aforementioned components is synthetic. By way of illustration, a library in which certain components are synthetic, while other components are of natural origin or derived via template-based amplification of molecules of natural origin, would be encompassed by the invention. Libraries that are fully synthetic would, of course, also be encompassed by the invention.

[0092] The term “theoretical diversity” refers to the maximum number of variants in a library design. For example, given an amino acid sequence of three residues, where residues one and three may each be any one of five amino acid types and residue two may be any one of 20 amino acid types, the theoretical diversity is 5×20×5=500 possible sequences. Similarly if sequence X is constructed by combination of 4 amino acid segments, where segment 1 has 100 possible sequences, segment 2 has 75 possible sequences, segment 3 has 250 possible sequences, and segment 4 has 30 possible sequences, the theoretical diversity of fragment X would be 100×75×200×30, or 5.6×10⁵ possible sequences.

[0093] The term “theoretical segment pool” refers to a set of polynucleotide or polypeptide segments that can be used as building blocks to assemble a larger polynucleotide or polypeptide. For example, a theoretical segment pool containing TN1, DH, N2, and H3-JH segments can be used to assemble a library of CDRH3 sequences by concatenating them combinatorially to form a sequence represented by [TN1]-[DH]-[N2]-[H3-JH], and synthesizing the corresponding oligonucleotide(s). The term “theoretical segment pool” can apply to any set of polynucleotide or polypeptide segments. Thus, while a set of TN1, DH, N2, and H3-JH segments are collectively considered a theoretical segment pool, each of the individual sets of segments also comprise a theoretical segment pool, specifically a TN1 theoretical segment pool, a DH theoretical segment pool, an N2 theoretical segment pool, and an H3-JH theoretical segment pool. Any subsets of these theoretical segment pools containing two or more sequences can also be considered theoretical segment pools.

[0094] The term “unique,” as used herein, refers to a sequence that is different (e.g., has a different chemical structure) from every other sequence within the designed set (e.g., the theoretical diversity). It should be understood that there are likely to be more than one copy of many unique sequences from the theoretical diversity in a particular physical realization. For example, a library comprising three unique sequences at the theoretical level may comprise nine total members if each sequence occurs three times in the physical realization of the library. However, in certain embodiments, each unique sequence may occur only once, less than once, or more than once.

[0095] The term “variable” refers to the portions of the immunoglobulin domains that exhibit variability in their sequence and that are involved in determining the specificity and binding affinity of a particular antibody (i.e., the “variable domain(s)”). Variability is not evenly distributed throughout the variable domains of antibodies; it is concentrated in sub-domains of each of the heavy and light chain variable regions. These sub-domains are called “hypervariable” regions or “complementarity determining regions” (CDRs). The more conserved (i.e., non-hypervariable) portions of the variable domains are called the “framework” regions (FRM). The variable domains of naturally occurring heavy and light chains each comprise four FRM regions, largely adopting a 13-sheet configuration, connected by three hypervariable regions, which form loops connecting, and in some cases forming part of, the 13-sheet structure. The hypervariable regions in each chain are held together in close proximity by the FRM and, with the hypervariable regions from the other chain, contribute to the formation of the antigen-binding site (see Kabat et al. Sequences of Proteins of Immunological Interest, 5th Ed. Public Health Service, National Institutes of Health, Bethesda, Md., 1991, incorporated by reference in its entirety). The constant domains are not directly involved in antigen binding, but exhibit various effector functions, such as, for example, antibody-dependent, cell-mediated cytotoxicity and complement activation.

[0096] Libraries of the invention containing “VKCDR3” sequences and “VλCDR3” sequences refer to the kappa and lambda sub-sets of the light chain CDR3 (CDRL3) sequences, respectively. Such libraries may be designed with directed diversity, to collectively represent the length and sequence diversity of the human antibody CDRL3 repertoire. “Preimmune” versions of these libraries have similar sequence diversities and length diversities as naturally occurring human antibody CDRL3 sequences before these sequences undergo negative selection and/or somatic hypermutation. Known human CDRL3 sequences are represented in various data sets, including the NCBI database, WO/2009/036379, and Martin, Proteins, 1996, 25: 130 each incorporated by reference in its entirety.

### General Design of Libraries

[0097] Antibody libraries provided by the present invention may be designed to reflect certain aspects of the preimmune repertoire as created by the human immune system. Certain libraries of the invention are based on rational design informed by collections of human V, D, and J genes, and large databases of human heavy and light chain sequences (e.g., publicly known germline sequences and sequences from Jackson et al., J. Immunol. Methods, 2007, 324: 26; Lee et al., Immunogenetics, 2006, 57: 917; Boyd et al., Science Translational Medicine, 2009, 1: 1-8, each incorporated by reference in its entirety; and sequences compiled from rearranged VK and Vλ sequences (see WO/2009/036379, also incorporated by reference in its entirety). Additional information may be found, for example, in Scaviner et al., Exp. Clin. Immunogenet., 1999, 16: 234; Tomlinson et al., J. Mol. Biol., 1992, 227: 799; and Matsuda et al., J. Exp. Med., 1998, 188: 2151, each incorporated by reference in its entirety.

[0098] In certain embodiments of the invention, segments representing the possible V, D, and J diversity found in the human repertoire, as well as junctional diversity (i.e., TN1 and N2), are synthesized de novo as single or double-stranded DNA oligonucleotides. In certain embodiments of the invention, oligonucleotides encoding CDR sequences are introduced into yeast along with one or more acceptor vectors containing heavy or light chain chassis sequences and constant domains. No primer-based PCR amplification or template-directed cloning steps from mammalian cDNA or mRNA are employed. Through standard homologous recombination, the recipient yeast recombines the CDR segments with the acceptor vectors containing the chassis sequences and constant regions, to create a properly ordered synthetic, full-length human heavy chain and/or light chain immunoglobulin library that can be genetically propagated, expressed, presented, and screened. One of ordinary skill in the art will readily recognize that the acceptor vector can be designed so as to produce constructs other than full-length human heavy chains and/or light chains. For example, in certain embodiments of the invention, the chassis may be designed to encode portions of a polypeptide encoding an antibody fragment or subunit of an antibody fragment, so that a sequence encoding an antibody fragment, or subunit thereof, is produced when the oligonucleotide cassette containing the CDR is recombined with the acceptor vector.

[0099] Thus, in certain embodiments, the invention provides a synthetic, preimmune human antibody repertoire the repertoire comprising:

[0100] (a) one or more selected human antibody heavy chain chassis (i.e., amino acids 1 to 94 of the heavy chain variable region, using Kabat's definition);

[0101] (b) a CDRH3 repertoire (described more fully below), designed based on the human IGHD and IGHJ germline sequences, and the extraction of TN1 and N2 sequences from reference sets of human CDRH3 sequences, the CDRH3 repertoire comprising (i) a TN1 segment; (ii) a DH segment; (iii) an N2 segment; (iv) an H3-JH segment.

[0102] (c) one or more selected human antibody kappa and/or lambda light chain chassis; and

[0103] (d) a CDRL3 repertoire designed based on the human IGLV and IGLJ germline sequences, wherein “L” may be a kappa or lambda light chain.

[0104] The instant invention also provides methods for producing and using such libraries, as well as libraries comprising one or more immunoglobulin domains or antibody fragments. Design and synthesis of each component of the antibody libraries of the invention is provided in more detail below.

### Design of Antibody Library Chassis Sequences

[0105] In certain embodiments, provided libraries are constructed from selected chassis sequences that are based on naturally occurring variable domain sequences (e.g., IGHV and IGLV genes). The selection of such chassis sequences can be done arbitrarily, or through the definition of certain pre-determined criteria. For example, the Kabat database, an electronic database containing non-redundant rearranged antibody sequences, can be queried for those heavy and light chain germline sequences that are most frequently represented. An algorithm such as BLAST, or a more specialized tool such as SoDA (Volpe et al., Bioinformatics, 2006, 22: 438-44, incorporated by reference in its entirety), can be used to compare rearranged antibody sequences with germline sequences (e.g., using the V BASE2 database; see, for example, Retter et al., Nucleic Acids Res., 2005, 33: D671-D674, incorporated by reference in its entirety), or similar collections of human V, D, and J genes, to identify germline families that are most frequently used to generate functional antibodies.

[0106] Several criteria can be utilized for the selection of chassis for inclusion in the libraries of the invention. For example, sequences that are known (or have been determined) to express poorly in yeast, or other organisms used in the invention (e.g., bacteria, mammalian cells, fungi, or plants) can be excluded from the libraries. Chassis may also be chosen based on the representation of their corresponding germline genes in the peripheral blood of humans. In certain embodiments of the invention, it may be desirable to select chassis that correspond to germline sequences that are highly represented in the peripheral blood of humans. In some embodiments, it may be desirable to select chassis that correspond to germline sequences that are less frequently represented, for example, to increase the canonical diversity of the library. Therefore, chassis may be selected to produce libraries that represent the largest and most structurally diverse group of functional human antibodies.

[0107] In certain embodiments of the invention, less diverse chassis may be utilized, for example, if it is desirable to produce a smaller, more focused library with less chassis variability and greater CDR variability. In some embodiments of the invention, chassis may be selected based on both their expression in a cell of the invention (e.g., a yeast cell) and the diversity of canonical structures represented by the selected sequences. One may therefore produce a library with a diversity of canonical structures that express well in a cell of the invention.

### Design of Heavy Chain Chassis Sequences

[0108] The design and selection of heavy chain chassis sequences that can be used in the current invention is described in detail in U.S. Publication Nos. 2009/0181855 and 2010/0056386, and WO/2009/036379, each of which is incorporated by reference in its entirety, and is therefore described only briefly here.

[0109] In general, VH domains of the library comprise three components: (1) a VH “chassis,” which includes amino acids 1 to 94 (using Kabat numbering), (2) the CDRH3, which is defined herein to include the Kabat CDRH3 proper (positions 95-102), and (3) the FRM4 region, including amino acids 103 to 113 (Kabat numbering). The overall VH domain structure may therefore be depicted schematically (not to scale) as:

[chemical structure]

[0110] In certain embodiments of the invention, the VH chassis of the libraries may comprise from about Kabat residue 1 to about Kabat residue 94 of one or more of the following IGHV germline sequences: IGHV1-2, IGHV1-3, IGHV1-8, IGHV1-18, IGHV1-24, IGHV1-45, IGHV1-46, IGHV1-58, IGHV1-69, IGH8, IGH56, IGH100, IGHV3-7, IGHV3-9, IGHV3-11, IGHV3-13, IGHV3-15, IGHV3-20, IGHV3-21, IGHV3-23, IGHV3-30, IGHV3-33, IGHV3-43, IGHV3-48, IGHV3-49, IGHV3-53, IGHV3-64, IGHV3-66, IGHV3-72, IGHV3-73, IGHV3-74, IGHV4-4, IGHV4-28, IGHV4-31, IGHV4-34, IGHV4-39, IGHV4-59, IGHV4-61, IGHV4-B, IGHV5-51, IGHV6-1, and/or IGHV7-4-1. In some embodiments of the invention, a library may contain one or more of these sequences, one or more allelic variants of these sequences, or encode an amino acid sequence at least about 99.9%, 99.5%, 99%, 98.5%, 98%, 97.5%, 97%, 96.5%, 96%, 95.5%, 95%, 94.5%, 94%, 93.5%, 93%, 92.5%, 92%, 91.5%, 91%, 90.5%, 90%, 89%, 88%, 87%, 86%, 85%, 84%, 83%, 82%, 81%, 80%, 77.5%, 75%, 73.5%, 70%, 65%, 60%, 55%, or 50% identical to one or more of these sequences. One of ordinary skill in the art will recognize that given the chassis definition provided above, any IGHV-encoding sequence can be adapted for use as a chassis of the invention. As exemplified in U.S. Publication Nos. 2009/0181855 and 2010/0056386, and WO/2009/036379 (each incorporated by reference in its entirety), these chassis can also be varied, particularly by altering the amino acid residues in the CDRH1 and CDRH2 regions, further increasing the diversity of the library.

### Design of Light Chain Chassis Sequences

[0111] The design and selection of light chain chassis sequences that can be used in the current invention is described in detail in U.S. Publication Nos. 2009/0181855 and 2010/0056386, and WO/2009/036379, each of which is incorporated by reference in its entirety, and is therefore described only briefly here. The light chain chassis of the invention may be based on kappa and/or lambda light chain sequences.

[0112] The VL domains of the library comprise three primary components: (1) a VL “chassis”, which includes amino acids 1 to 88 (using Kabat numbering), (2) the CDRL3, which is defined herein to include the Kabat CDRL3 proper (positions 89-97), and (3) the FRM4 region, including amino acids 98 to 107 (Kabat numbering). The overall VL domain structure may therefore be depicted schematically (not to scale) as:

[chemical structure]

[0113] In certain embodiments of the invention, the VL chassis of the libraries include one or more chassis based on IGKV germline sequences. In certain embodiments of the invention, the VL chassis of the libraries may comprise from about Kabat residue 1 to about Kabat residue 88 of one or more of the following IGKV germline sequences: IGKV1-05, IGKV1-06, IGKV1-08, IGKV1-09, IGKV1-12, IGKV1-13, IGKV1-16, IGKV1-17, IGKV1-27, IGKV1-33, IGKV1-37, IGKV1-39, IGKV1D-16, IGKV1D-17, IGKV1D-43, IGKV1D-8, IGK54, IGK58, IGK59, IGK60, IGK70, IGKV2D-26, IGKV2D-29, IGKV2D-30, IGKV3-11, IGKV3-15, IGKV3-20, IGKV3D-07, IGKV3D-11, IGKV3D-20, IGKV4-1, IGKV5-2, IGKV6-21, and/or IGKV6D-41. In some embodiments of the invention, a library may contain one or more of these sequences, one or more allelic variants of these sequences, or encode an amino acid sequence at least about 99.9%, 99.5%, 99%, 98.5%, 98%, 97.5%, 97%, 96.5%, 96%, 95.5%, 95%, 94.5%, 94%, 93.5%, 93%, 92.5%, 92%, 91.5%, 91%, 90.5%, 90%, 89%, 88%, 87%, 86%, 85%, 84%, 83%, 82%, 81%, 80%, 77.5%, 75%, 73.5%, 70%, 65%, 60%, 55%, or 50% identical to one or more of these sequences.

[0114] In certain embodiments of the invention, the VL chassis of the libraries include one or more chassis based on IGλV germline sequences. In certain embodiments of the invention, the VL chassis of the libraries may comprise from about Kabat residue 1 to about Kabat residue 88 of one or more of the following IGλV germline sequences: IGλV3-1, IGλV3-21, IGλ44, IGλV1-40, IGλV3-19, IGλV1-51, IGλV1-44, IGλV6-57, IGλ11, IGλV3-25, IGλ53, IGλV3-10, IGλV4-69, IGλV1-47, IGλ41, IGλV7-43, IGλV7-46, IGλV5-45, IGλV4-60, IGλV10-54, IGλV8-61, IGλV3-9, IGλV1-36, IGλ48, IGλV3-16, IGλV3-27, IGλV4-3, IGλV5-39, IGλV9-49, and/or IGλV3-12. In some embodiments of the invention, a library may contain one or more of these sequences, one or more allelic variants of these sequences, or encode an amino acid sequence at least about 99.9%, 99.5%, 99%, 98%, 97%, 96%, 95%, 94%, 93%, 92%, 91%, 90%, 85%, 80%, 75%, 70%, 65%, 60%, 55%, or 50% identical to one or more of these sequences.

[0115] One of ordinary skill in the art will recognize that given the chassis definition provided above, any IGKV- or IGλV-encoding sequence can be adapted for use as a chassis of the invention.

### Design and Selection of TN1, DH, N2, and H3-JH Segments

[0116] The human germline repertoire contains at least six IGHJ genes (IGHJ1, IGHJ2, IGHJ3, IGHJ4, IGHJ5, and IGHJ6; included in Table 14, where the primary allele is designated “01,” and selected allelic variants are designated “02” or “03”), and at least 27 IGHD genes (Table 16, including allelic variants). In some embodiments, the invention comprises a library of CDRH3 polypeptide sequences, or polynucleotide sequences encoding CDRH3 sequences, the library comprising members of any of the theoretical segment pools disclosed herein.

[0117] A person of ordinary skill in the art will recognize that not every segment in a theoretical segment pool provided herein is necessary to produce a functional CDRH3 library of the invention. Therefore, in certain embodiments, a CDRH3 library of the invention will contain a subset of the segments of any of the theoretical segment pools described herein. For example, in certain embodiments of the invention, at least about 15, 30, 45, 60, 75, 90, 100, 105, 120, 135, 150, 165, 180, 195, 200, 210, 225, 240, 255, 270, 285, 300, 320, 340, 360, 380, 400, 420, 440, 460, 480, 500, 520, 540, 560, 580, 600, 620, 640, or 643 of the H3-JH segments of any of the theoretical segment pools provided herein, or generated by the methods described herein, are included in a library. In some embodiments of the invention, at least about 15, 30, 45, 60, 75, 90, 100, 105, 120, 135, 150, 165, 180, 195, 200, 250, 300, 350, 400, 450, 500, 550, 600, 650, 700, 750, 800, 850, 900, 950, 1000, 1050, 1100, 1111, 2000, 3000, 4000, 5000, 6000, 7000, 14000, 21000, 28000, 35000, 42000, 49000, 56000, 63000, or 68374 of the DH segments of any of the theoretical segment pools provided herein, or generated by the methods described herein, are included in a library. In some embodiments of the invention, at least about 10, 20, 30, 40, 50, 60, 70, 80, 90, 100, 110, 120, 130, 140, 141, 150, 160, 170, 180, 190, or 200, 220, 240, 260, 280, 300, 320, 340, 360, 380, 400, 420, 424, 440, 460, 480, 500, 550, 600, 650, 700, 727, 750, 800, 850, 900, 950, or 1000 of the TN1 and/or N2 segments of any of the theoretical segment pools provided herein, or generated by the methods described herein, are included in a library. In certain embodiments, a library of the invention may contain less than a particular number of polynucleotide or polypeptide segments, where the number of segments is defined using any one of the integers provided above for the respective segment. In some embodiments of the invention, a particular numerical range is defined, using any two of the integers provided above as lower and upper boundaries of the range, inclusive or exclusive. All combinations of the integers provided, which define an upper and lower boundary, are contemplated.

[0118] In certain embodiments, the invention provides CDRH3 libraries comprising at least about 1%, 2.5%, 5%, 10%, 15%, 20%, 25%, 30%, 40%, 45%, 50%, 55%, 60%, 65%, 70%, 75%, 80%, 85%, 90%, 95%, or 99% of the segments from any of the theoretical segment pools provided herein. For example, the invention provides libraries comprising at least about 1%, 2.5%, 5%, 10%, 15%, 20%, 25%, 30%, 40%, 45%, 50%, 55%, 60%, 65%, 70%, 75%, 80%, 85%, 90%, 95%, or 99% of the TN1, DH, N2, and/or H3-JH segments from any of the theoretical segment pools provided herein. In some embodiments of the invention, a particular percentage range is defined, using any two of the percentages provided above as lower and upper boundaries of the range, inclusive or exclusive. All combinations of the percentages provided, which define an upper and lower boundary, are contemplated.

[0119] In some embodiments of the invention, at least about 1%, 2.5%, 5%, 10%, 15%, 20%, 25%, 30%, 40%, 45%, 50%, 55%, 60%, 65%, 70%, 75%, 80%, 85%, 90%, 95%, or 99% of the H3-JH, DH, TN1, and/or N2 segments in a CDRH3 library are H3-JH, DH, TN1, and/or N2 segments of any of the theoretical segment pools provided herein, or generated by the methods described herein. In some embodiments of the invention, at least about 1%, 2.5%, 5%, 10%, 15%, 20%, 25%, 30%, 40%, 45%, 50%, 55%, 60%, 65%, 70%, 75%, 80%, 85%, 90%, 95%, or 99% of the H3-JH, DH, TN1, and/or N2 segments of antibodies isolated from a CDRH3 library (e.g., by binding to a particular antigen and/or generic ligand through one or more rounds of selection) are H3-JH, DH, TN1, and/or N2 segments of any of the theoretical segment pools provided herein, or generated by methods described herein. In certain embodiments, a CDRH3 library of the invention may contain less than a particular percentage of H3-JH, DH, TN1, and/or N2 segments of any of the theoretical segment pools provided herein, or generated by the methods described herein, where the number of segments is defined using any one of the percentages provided above for the respective segment. In some embodiments of the invention, a particular percentage range is defined, using any two of the percentages provided above as lower and upper boundaries of the range, inclusive or exclusive. All combinations of the percentages provided, which define an upper and lower boundary, are contemplated.

[0120] One of ordinary skill in the art will appreciate, upon reading the disclosure herein. that given the TN1, DH, N2, and/or H3-JH segments of any of the theoretical segment pools provided herein, or generated by the methods described herein, similar TN1, DH, N2, and/or H3-JH segments, and corresponding CDRH3 libraries, could be produced which, while not 100% identical to those provided in terms of their sequences, may be functionally very similar. Such theoretical segment pools and CDRH3 libraries also fall within the scope of the invention. A variety of techniques well-known in the art could be used to obtain these additional sequences, including the mutagenesis techniques provided herein. Therefore, each of the explicitly enumerated embodiments of the invention can also be practiced using segments that share a particular percent identity to any of the segments of any of the theoretical segment pools provided herein, or generated by the methods described herein. For example, each of the previously described embodiments of the invention can be practiced using TN1, DH, N2, and/or H3-JH segments that are at least about 50%, 55%, 60%, 65%, 70%, 75%, 80%, 85%, 90%, 91%, 92%, 93%, 94%, 95%, 96%, 97%, 98%, 99%, 99.5%, or 99.9% identical to the TN1, DH, N2, and/or H3-JH segments of any of the theoretical segment pools provided herein, or generated by the methods described herein.

[0121] In some embodiments, the invention provides libraries produced from one or more VH chassis sequences combined with one or more TN1 segments, one or more DH segments, one or more N2 segments, and one or more H3-JH segments. In certain embodiments at least 1, 2, 5, 10, 20, 50, 75, or 100, of each chassis, TN1, DH, N2, or H3-JH segments are included in a library of the invention.

[0122] In some embodiments, the invention provides a method of selecting TN1, DH, N2, and H3-JH segments from a theoretical segment pool for inclusion in a synthetic CDRH3 library, comprising:
[0123] (i) providing a theoretical segment pool containing one or more of TN1, DH, N2, and H3-JH segments;
[0124] (ii) providing a reference set of CDRH3 sequences;
[0125] (iii) utilizing the theoretical segment pool of (i) to identify the closest match(es) to each CDRH3 sequence in the reference set of (ii); and
[0126] (iv) selecting segments from the theoretical segment pool for inclusion in a synthetic library.

[0127] In some embodiments, the selection process of (iv) can optionally involve any number of additional criteria, including the frequency of occurrence of the segments of (i) in the reference set of (ii); the corresponding segmental usage weights; and any physicochemical properties (see all numerical indices at www.genome.ip/aaindex/) of the segments (e.g., hydrophobicity, alpha-helical propensity, and/or isoelectric point). Optionally, TN1 and/or N2 segments that do not occur in the theoretical segment pool of (i) but that are found in the reference set of (ii) may be identified and added to prospective theoretical segment pools to produce theoretical segment pools with increased TN1 and/or N2 diversity in the prospective theoretical segment pools and/or synthetic libraries of the invention.

[0128] Any characteristic or set of characteristics of the segments can be used to choose them for inclusion in the library, including for example one or more biological properties (e.g., immunogenicity, stability, half-life) and/or one or more physicochemical properties such as the numerical indices provided above. In some embodiments, at least 1, 2, 3, 4, 5, 6, 7, 8, 9, 10, 11, 12, 13, 14, 15 or more such properties is used to select segments for inclusion in a library of the invention.

Physiochemical properties included in the index provided above can include, for example, ANDN920101 alpha-CH chemical shifts (Andersen et al., 1992); ARGP820101 Hydrophobicity index (Argos et al., 1982); ARGP820102 Signal sequence helical potential (Argos et al., 1982); ARGP820103 Membrane-buried preference parameters (Argos et al., 1982); BEGF750101 Conformational parameter of inner helix (Beghin-Dirkx, 1975); BEGF750102 Conformational parameter of beta-structure (Beghin-Dirkx, 1975); BEGF750103 Conformational parameter of beta-turn (Beghin-Dirkx, 1975); BHAR880101Average flexibility indices (Bhaskaran-Ponnuswamy, 1988); BIGC670101 Residue volume (Bigelow, 1967); BIOV880101 Information value for accessibility; average fraction 35% (Biou et al., 1988); BIOV880102 Information value for accessibility; average fraction 23% (Biou et al., 1988); BROC820101 Retention coefficient in TFA (Browne et al., 1982); BROC820102 Retention coefficient in HFBA (Browne et al., 1982); BULH740101 Transfer free energy to surface (Bull-Breese, 1974); BULH740102 Apparent partial specific volume (Bull-Breese, 1974); BUNA790101 alpha-NH chemical shifts (Bundi-Wuthrich, 1979); BUNA790102 alpha-CH chemical shifts (Bundi-Wuthrich, 1979); BUNA790103 Spin-spin coupling constants 3JHalpha-NH (Bundi-Wuthrich, 1979); BURA740101 Normalized frequency of alpha-helix (Burgess et al., 1974); BURA740102 Normalized frequency of extended structure (Burgess et al., 1974); CHAM810101 Steric parameter (Charton, 1981); CHAM820101 Polarizability parameter (Charton-Charton, 1982); CHAM820102 Free energy of solution in water, kcal/mole (Charton-Charton, 1982); CHAM830101 The Chou-Fasman parameter of the coil conformation (Charton-Charton, 1983); CHAM830102 A parameter defined from the residuals obtained from the best correlation of the Chou-Fasman parameter of beta-sheet (Charton-Charton, 1983); CHAM830103 The number of atoms in the side chain labelled 1+1 (Charton-Charton, 1983); CHAM830104 The number of atoms in the side chain labelled 2+1 (Charton-Charton, 1983); CHAM830105 The number of atoms in the side chain labelled 3+1 (Charton-Charton, 1983); CHAM830106 The number of bonds in the longest chain (Charton-Charton, 1983); CHAM830107 A parameter of charge transfer capability (Charton-Charton, 1983); CHAM830108 A parameter of charge transfer donor capability (Charton-Charton, 1983); CHOC750101 Average volume of buried residue (Chothia, 1975); CHOC760101 Residue accessible surface area in tripeptide (Chothia, 1976); CHOC760102 Residue accessible surface area in folded protein (Chothia, 1976); CHOC760103 Proportion of residues 95% buried (Chothia, 1976); CHOC760104 Proportion of residues 100% buried (Chothia, 1976); CHOP780101 Normalized frequency of beta-turn (Chou-Fasman, 1978a); CHOP780201 Normalized frequency of alpha-helix (Chou-Fasman, 1978b); CHOP780202 Normalized frequency of beta-sheet (Chou-Fasman, 1978b); CHOP780203 Normalized frequency of beta-turn (Chou-Fasman, 1978b); CHOP780204 Normalized frequency of N-terminal helix (Chou-Fasman, 1978b); CHOP780205 Normalized frequency of C-terminal helix (Chou-Fasman, 1978b); CHOP780206 Normalized frequency of N-terminal non helical region (Chou-Fasman, 1978b); CHOP780207 Normalized frequency of C-terminal non helical region (Chou-Fasman, 1978b); CHOP780208 Normalized frequency of N-terminal beta-sheet (Chou-Fasman, 1978b); CHOP780209 Normalized frequency of C-terminal beta-sheet (Chou-Fasman, 1978b); CHOP780210 Normalized frequency of N-terminal non beta region (Chou-Fasman, 1978b); CHOP780211 Normalized frequency of C-terminal non beta region (Chou-Fasman, 1978b); CHOP780212 Frequency of the 1st residue in turn (Chou-Fasman, 1978b); CHOP780213 Frequency of the 2nd residue in turn (Chou-Fasman, 1978b); CHOP780214 Frequency of the 3rd residue in turn (Chou-Fasman, 1978b); CHOP780215 Frequency of the 4th residue in turn (Chou-Fasman, 1978b); CHOP780216 Normalized frequency of the 2nd and 3rd residues in turn (Chou-Fasman, 1978b); CIDH920101 Normalized hydrophobicity scales for alpha-proteins (Cid et al., 1992); CIDH920102 Normalized hydrophobicity scales for beta-proteins (Cid et al., 1992); CIDH920103 Normalized hydrophobicity scales for alpha+beta-proteins (Cid et al., 1992); CIDH920104 Normalized hydrophobicity scales for alpha/beta-proteins (Cid et al., 1992); CIDH920105 Normalized average hydrophobicity scales (Cid et al., 1992); COHE430101 Partial specific volume (Cohn-Edsall, 1943); CRAJ730101 Normalized frequency of middle helix (Crawford et al., 1973); CRAJ730102 Normalized frequency of beta-sheet (Crawford et al., 1973); CRAJ730103 Normalized frequency of turn (Crawford et al., 1973); DAWD720101 Size (Dawson, 1972); DAYM780101 Amino acid composition (Dayhoff et al., 1978a); DAYM780201 Relative mutability (Dayhoff et al., 1978b); DESM900101 Membrane preference for cytochrome b: MPH89 (Degli Esposti et al., 1990); DESM900102 Average membrane preference: AMP07 (Degli Esposti et al., 1990); EISD840101 Consensus normalized hydrophobicity scale (Eisenberg, 1984); EISD860101 Solvation free energy (Eisenberg-McLachlan, 1986); EISD860102 Atom-based hydrophobic moment (Eisenberg-McLachlan, 1986); EISD860103 Direction of hydrophobic moment (Eisenberg-McLachlan, 1986); FASG760101 Molecular weight (Fasman, 1976); FASG760102 Melting point (Fasman, 1976); FASG760103 Optical rotation (Fasman, 1976); FASG760104 pK-N (Fasman, 1976); FASG760105 pK-C (Fasman, 1976); FAUJ830101 Hydrophobic parameter pi (Fauchere-Pliska, 1983); FAUJ880101 Graph shape index (Fauchere et al., 1988); FAUJ880102 Smoothed upsilon steric parameter (Fauchere et al., 1988); FAUJ880103 Normalized van der Waals volume (Fauchere et al., 1988); FAUJ880104 STERIMOL length of the side chain (Fauchere et al., 1988); FAUJ880105 STERIMOL minimum width of the side chain (Fauchere et al., 1988); FAUJ880106 STERIMOL maximum width of the side chain (Fauchere et al., 1988); FAUJ880107 N.m.r. chemical shift of alpha-carbon (Fauchere et al., 1988); FAUJ880108 Localized electrical effect (Fauchere et al., 1988); FAUJ880109 Number of hydrogen bond donors (Fauchere et al., 1988); FAUJ880110 Number of full nonbonding orbitals (Fauchere et al., 1988); FAUJ880111 Positive charge (Fauchere et al., 1988); FAUJ880112 Negative charge (Fauchere et al., 1988); FAUJ880113 pK-a(RCOOH) (Fauchere et al., 1988); FINA770101 Helix-coil equilibrium constant (Finkelstein-Ptitsyn, 1977); FINA910101 Helix initiation parameter at posision i−1 (Finkelstein et al., 1991); FINA910102 Helix initiation parameter at posision i, i+1, i+2 (Finkelstein et al., 1991); FINA910103 Helix termination parameter at posision j−2, j−1,j (Finkelstein et al., 1991); FINA910104 Helix termination parameter at posision j+1 (Finkelstein et al., 1991); GARJ730101 Partition coefficient (Garel et al., 1973); GEIM800101 Alpha-helix indices (Geisow-Roberts, 1980); GEIM800102 Alpha-helix indices for alpha-proteins (Geisow-Roberts, 1980); GEIM800103 Alpha-helix indices for beta-proteins (Geisow-Roberts, 1980); GEIM800104 Alpha-helix indices for alpha/beta-proteins (Geisow-Roberts, 1980); GEIM800105 Beta-strand indices (Geisow-Roberts, 1980); GEIM800106 Beta-strand indices for beta-proteins (Geisow-Roberts, 1980); GEIM800107 Beta-strand indices for alpha/beta-proteins (Geisow-Roberts, 1980) GEIM800108 Aperiodic indices (Geisow-Roberts, 1980); GEIM800109 Aperiodic indices for alpha-proteins (Geisow-Roberts, 1980); GEIM800110 Aperiodic indices for beta-proteins (Geisow-Roberts, 1980); GEIM800111 Aperiodic indices for alpha/beta-proteins (Geisow-Roberts, 1980); GOLD730101 Hydrophobicity factor (Goldsack-Chalifoux, 1973); GOLD730102 Residue volume (Goldsack-Chalifoux, 1973); GRAR740101 Composition (Grantham, 1974); GRAR740102Polarity (Grantham, 1974) GRAR740103 Volume (Grantham, 1974); GUYH850101 Partition energy (Guy, 1985); HOPA770101 Hydration number (Hopfinger, 1971), Cited by Charton-Charton (1982) HOPT810101 Hydrophilicity value (Hopp-Woods, 1981); HUTJ700101 Heat capacity (Hutchens, 1970); HUTJ700102 Absolute entropy (Hutchens, 1970); HUTJ700103 Entropy of formation (Hutchens, 1970); ISOY800101 Normalized relative frequency of alpha-helix (Isogai et al., 1980); ISOY800102 Normalized relative frequency of extended structure (Isogai et al., 1980); ISOY800103 Normalized relative frequency of bend (Isogai et al., 1980); ISOY800104 Normalized relative frequency of bend R (Isogai et al., 1980); ISOY800105 Normalized relative frequency of bend S (Isogai et al., 1980); ISOY800106 Normalized relative frequency of helix end (Isogai et al., 1980); ISOY800107 Normalized relative frequency of double bend (Isogai et al., 1980); ISOY800108 Normalized relative frequency of coil (Isogai et al., 1980); JANJ780101 Average accessible surface area (Janin et al., 1978); JANJ780102 Percentage of buried residues (Janin et al., 1978); JANJ780103 Percentage of exposed residues (Janin et al., 1978); JANJ790101 Ratio of buried and accessible molar fractions (Janin, 1979); JANJ790102 Transfer free energy (Janin, 1979); JOND750101 Hydrophobicity (Jones, 1975); JOND750102 pK (—COOH) (Jones, 1975); JOND920101 Relative frequency of occurrence (Jones et al., 1992); JOND920102 Relative mutability (Jones et al., 1992) JUKT750101 Amino acid distribution (Jukes et al., 1975); JUNJ780101 Sequence frequency (Jungck, 1978); KANM800101 Average relative probability of helix (Kanehisa-Tsong, 1980); KANM800102 Average relative probability of beta-sheet (Kanehisa-Tsong, 1980); KANM800103 Average relative probability of inner helix (Kanehisa-Tsong, 1980); KANM800104 Average relative probability of inner beta-sheet (Kanehisa-Tsong, 1980); KARP850101 Flexibility parameter for no rigid neighbors (Karplus-Schulz, 1985); KARP850102 Flexibility parameter for one rigid neighbor (Karplus-Schulz, 1985); KARP850103 Flexibility parameter for two rigid neighbors (Karplus-Schulz, 1985); KHAG800101 The Kerr-constant increments (Khanarian-Moore, 1980); KLEP840101 Net charge (Klein et al., 1984); KRIW710101 Side chain interaction parameter (Krigbaum-Rubin, 1971); KRIW790101 Side chain interaction parameter (Krigbaum-Komoriya, 1979); KRIW790102 Fraction of site occupied by water (Krigbaum-Komoriya, 1979); KRIW790103 Side chain volume (Krigbaum-Komoriya, 1979); KYTJ820101 Hydropathy index (Kyte-Doolittle, 1982); LAWE840101 Transfer free energy, CHP/water (Lawson et al., 1984); LEVM760101 Hydrophobic parameter (Levitt, 1976); LEVM760102 Distance between C-alpha and centroid of side chain (Levitt, 1976); LEVM760103 Side chain angle theta(AAR) (Levitt, 1976); LEVM760104 Side chain torsion angle phi(AAAR) (Levitt, 1976); LEVM760105 Radius of gyration of side chain (Levitt, 1976); LEVM760106 van der Waals parameter R0 (Levitt, 1976) LEVM760107 van der Waals parameter epsilon (Levitt, 1976); LEVM780101 Normalized frequency of alpha-helix, with weights (Levitt, 1978); LEVM780102 Normalized frequency of beta-sheet, with weights (Levitt, 1978); LEVM780103 Normalized frequency of reverse turn, with weights (Levitt, 1978); LEVM780104 Normalized frequency of alpha-helix, unweighted (Levitt, 1978); LEVM780105 Normalized frequency of beta-sheet, unweighted (Levitt, 1978); LEVM780106 Normalized frequency of reverse turn, unweighted (Levitt, 1978); LEWP710101 Frequency of occurrence in beta-bends (Lewis et al., 1971); LIFS790101 Conformational preference for all beta-strands (Lifson-Sander, 1979); LIFS790102 Conformational preference for parallel beta-strands (Lifson-Sander, 1979); LIFS790103 Conformational preference for antiparallel beta-strands (Lifson-Sander, 1979); MANP780101 Average surrounding hydrophobicity (Manavalan-Ponnuswamy, 1978); MAXF760101 Normalized frequency of alpha-helix (Maxfield-Scheraga, 1976); MAXF760102 Normalized frequency of extended structure (Maxfield-Scheraga, 1976); MAXF760103 Normalized frequency of zeta R (Maxfield-Scheraga, 1976); MAXF760104 Normalized frequency of left-handed alpha-helix (Maxfield-Scheraga, 1976); MAXF760105 Normalized frequency of zeta L (Maxfield-Scheraga, 1976); MAXF760106 Normalized frequency of alpha region (Maxfield-Scheraga, 1976); MCMT640101 Refractivity (McMeekin et al., 1964), Cited by Jones (1975); MEEJ800101 Retention coefficient in HPLC, pH7.4 (Meek, 1980); MEEJ800102 Retention coefficient in HPLC, pH2.1 (Meek, 1980); MEEJ810101 Retention coefficient in NaClO4 (Meek-Rossetti, 1981); MEEJ810102 Retention coefficient in NaH2PO4 (Meek-Rossetti, 1981); MEIH800101 Average reduced distance for C-alpha (Meirovitch et al., 1980); MEIH800102 Average reduced distance for side chain (Meirovitch et al., 1980); MEIH800103 Average side chain orientation angle (Meirovitch et al., 1980); MIYS850101 Effective partition energy (Miyazawa-Jernigan, 1985); NAGK730101 Normalized frequency of alpha-helix (Nagano, 1973); NAGK730102 Normalized frequency of bata-structure (Nagano, 1973) NAGK730103 Normalized frequency of coil (Nagano, 1973); NAKH900101 AA composition of total proteins (Nakashima et al., 1990); NAKH900102 SD of AA composition of total proteins (Nakashima et al., 1990); NAKH900103 AA composition of mt-proteins (Nakashima et al., 1990); NAKH900104 Normalized composition of mt-proteins (Nakashima et al., 1990); NAKH900105 AA composition of mt-proteins from animal (Nakashima et al., 1990); NAKH900106 Normalized composition from animal (Nakashima et al., 1990); NAKH900107 AA composition of mt-proteins from fungi and plant (Nakashima et al., 1990); NAKH900108 Normalized composition from fungi and plant (Nakashima et al., 1990); NAKH900109 AA composition of membrane proteins (Nakashima et al., 1990); NAKH900110 Normalized composition of membrane proteins (Nakashima et al., 1990); NAKH900111 Transmembrane regions of non-mt-proteins (Nakashima et al., 1990); NAKH900112 Transmembrane regions of mt-proteins (Nakashima et al., 1990); NAKH900113 Ratio of average and computed composition (Nakashima et al., 1990); NAKH920101 AA composition of CYT of single-spanning proteins (Nakashima-Nishikawa, 1992); NAKH920102 AA composition of CYT2 of single-spanning proteins (Nakashima-Nishikawa, 1992); NAKH920103 AA composition of EXT of single-spanning proteins (Nakashima-Nishikawa, 1992); NAKH920104 AA composition of EXT2 of single-spanning proteins (Nakashima-Nishikawa, 1992); NAKH920105 AA composition of MEM of single-spanning proteins (Nakashima-Nishikawa, 1992); NAKH920106 AA composition of CYT of multi-spanning proteins (Nakashima-Nishikawa, 1992); NAKH920107 AA composition of EXT of multi-spanning proteins (Nakashima-Nishikawa, 1992); NAKH920108 AA composition of MEM of multi-spanning proteins (Nakashima-Nishikawa, 1992); NISK800101 8 A contact number (Nishikawa-Ooi, 1980); NISK860101 14 A contact number (Nishikawa-Ooi, 1986); NOZY710101 Transfer energy, organic solvent/water (Nozaki-Tanford, 1971); OOBM770101 Average non-bonded energy per atom (Oobatake-Ooi, 1977); OOBM770102 Short and medium range non-bonded energy per atom (Oobatake-Ooi, 1977); OOBM770103 Long range non-bonded energy per atom (Oobatake-Ooi, 1977) OOBM770104 Average non-bonded energy per residue (Oobatake-Ooi, 1977); OOBM770105 Short and medium range non-bonded energy per residue (Oobatake-Ooi, 1977); OOBM850101 Optimized beta-structure-coil equilibrium constant (Oobatake et al., 1985); OOBM850102 Optimized propensity to form reverse turn (Oobatake et al., 1985); OOBM850103 Optimized transfer energy parameter (Oobatake et al., 1985); OOBM850104 Optimized average non-bonded energy per atom (Oobatake et al., 1985); OOBM850105 Optimized side chain interaction parameter (Oobatake et al., 1985); PALJ810101 Normalized frequency of alpha-helix from LG (Palau et al., 1981); PALJ810102 Normalized frequency of alpha-helix from CF (Palau et al., 1981); PALJ810103 Normalized frequency of beta-sheet from LG (Palau et al., 1981); PALJ810104 Normalized frequency of beta-sheet from CF (Palau et al., 1981); PALJ810105 Normalized frequency of turn from LG (Palau et al., 1981); PALJ810106 Normalized frequency of turn from CF (Palau et al., 1981); PALJ810107 Normalized frequency of alpha-helix in all-alpha class (Palau et al., 1981); PALJ810108 Normalized frequency of alpha-helix in alpha+beta class (Palau et al., 1981); PALJ810109 Normalized frequency of alpha-helix in alpha/beta class (Palau et al., 1981); PALJ810110 Normalized frequency of beta-sheet in all-beta class (Palau et al., 1981); PALJ810111 Normalized frequency of beta-sheet in alpha+beta class (Palau et al., 1981); PALJ810112 Normalized frequency of beta-sheet in alpha/beta class (Palau et al., 1981); PALJ810113 Normalized frequency of turn in all-alpha class (Palau et al., 1981); PALJ810114 Normalized frequency of turn in all-beta class (Palau et al., 1981); PALJ810115 Normalized frequency of turn in alpha+beta class (Palau et al., 1981); PALJ810116 Normalized frequency of turn in alpha/beta class (Palau et al., 1981); PARJ860101 HPLC parameter (Parker et al., 1986); PLIV810101 Partition coefficient (Pliska et al., 1981); PONP800101 Surrounding hydrophobicity in folded form (Ponnuswamy et al., 1980); PONP800102 Average gain in surrounding hydrophobicity (Ponnuswamy et al., 1980); PONP800103 Average gain ratio in surrounding hydrophobicity (Ponnuswamy et al., 1980); PONP800104 Surrounding hydrophobicity in alpha-helix (Ponnuswamy et al., 1980); PONP800105 Surrounding hydrophobicity in beta-sheet (Ponnuswamy et al., 1980); PONP800106 Surrounding hydrophobicity in turn (Ponnuswamy et al., 1980); PONP800107 Accessibility reduction ratio (Ponnuswamy et al., 1980); PONP800108 Average number of surrounding residues (Ponnuswamy et al., 1980); PRAM820101 Intercept in regression analysis (Prabhakaran-Ponnuswamy, 1982); PRAM820102 Slope in regression analysis ×1.0E1 (Prabhakaran-Ponnuswamy, 1982); PRAM820103 Correlation coefficient in regression analysis (Prabhakaran-Ponnuswamy, 1982); PRAM900101 Hydrophobicity (Prabhakaran, 1990); PRAM900102 Relative frequency in alpha-helix (Prabhakaran, 1990); PRAM900103 Relative frequency in beta-sheet (Prabhakaran, 1990); PRAM900104 Relative frequency in reverse-turn (Prabhakaran, 1990); PTIO830101 Helix-coil equilibrium constant (Ptitsyn-Finkelstein, 1983); PTIO830102 Beta-coil equilibrium constant (Ptitsyn-Finkelstein, 1983); QIAN880101 Weights for alpha-helix at the window position of −6 (Qian-Sejnowski, 1988); QIAN880102 Weights for alpha-helix at the window position of −5 (Qian-Sejnowski, 1988); QIAN880103 Weights for alpha-helix at the window position of −4 (Qian-Sejnowski, 1988); QIAN880104 Weights for alpha-helix at the window position of −3 (Qian-Sejnowski, 1988); QIAN880105 Weights for alpha-helix at the window position of −2 (Qian-Sejnowski, 1988); QIAN880106 Weights for alpha-helix at the window position of −1 (Qian-Sejnowski, 1988); QIAN880107 Weights for alpha-helix at the window position of 0 (Qian-Sejnowski, 1988); QIAN880108 Weights for alpha-helix at the window position of 1 (Qian-Sejnowski, 1988); QIAN880109 Weights for alpha-helix at the window position of 2 (Qian-Sejnowski, 1988); QIAN880110 Weights for alpha-helix at the window position of 3 (Qian-Sejnowski, 1988); QIAN880111 Weights for alpha-helix at the window position of 4 (Qian-Sejnowski, 1988); QIAN880112 Weights for alpha-helix at the window position of 5 (Qian-Sejnowski, 1988); QIAN880113 Weights for alpha-helix at the window position of 6 (Qian-Sejnowski, 1988); QIAN880114 Weights for beta-sheet at the window position of −6 (Qian-Sejnowski, 1988); QIAN880115 Weights for beta-sheet at the window position of −5 (Qian-Sejnowski, 1988); QIAN880116 Weights for beta-sheet at the window position of −4 (Qian-Sejnowski, 1988); QIAN880117 Weights for beta-sheet at the window position of −3 (Qian-Sejnowski, 1988); QIAN880118 Weights for beta-sheet at the window position of −2 (Qian-Sejnowski, 1988); QIAN880119 Weights for beta-sheet at the window position of −1 (Qian-Sejnowski, 1988); QIAN880120 Weights for beta-sheet at the window position of 0 (Qian-Sejnowski, 1988); QIAN880121 Weights for beta-sheet at the window position of 1 (Qian-Sejnowski, 1988); QIAN880122 Weights for beta-sheet at the window position of 2 (Qian-Sejnowski, 1988); QIAN880123 Weights for beta-sheet at the window position of 3 (Qian-Sejnowski, 1988); QIAN880124 Weights for beta-sheet at the window position of 4 (Qian-Sejnowski, 1988); QIAN880125 Weights for beta-sheet at the window position of 5 (Qian-Sejnowski, 1988); QIAN880126 Weights for beta-sheet at the window position of 6 (Qian-Sejnowski, 1988); QIAN880127 Weights for coil at the window position of −6 (Qian-Sejnowski, 1988); QIAN880128 Weights for coil at the window position of −5 (Qian-Sejnowski, 1988); QIAN880129 Weights for coil at the window position of −4 (Qian-Sejnowski, 1988); QIAN880130 Weights for coil at the window position of −3 (Qian-Sejnowski, 1988); QIAN880131 Weights for coil at the window position of −2 (Qian-Sejnowski, 1988); QIAN880132 Weights for coil at the window position of −1 (Qian-Sejnowski, 1988); QIAN880133 Weights for coil at the window position of 0 (Qian-Sejnowski, 1988); QIAN880134 Weights for coil at the window position of 1 (Qian-Sejnowski, 1988); QIAN880135 Weights for coil at the window position of 2 (Qian-Sejnowski, 1988); QIAN880136 Weights for coil at the window position of 3 (Qian-Sejnowski, 1988); QIAN880137 Weights for coil at the window position of 4 (Qian-Sejnowski, 1988); QIAN880138 Weights for coil at the window position of 5 (Qian-Sejnowski, 1988); QIAN880139 Weights for coil at the window position of 6 (Qian-Sejnowski, 1988); RACS770101 Average reduced distance for C-alpha (Rackovsky-Scheraga, 1977); RACS770102 Average reduced distance for side chain (Rackovsky-Scheraga, 1977); RACS770103 Side chain orientational preference (Rackovsky-Scheraga, 1977); RACS820101 Average relative fractional occurrence in A0(i) (Rackovsky-Scheraga, 1982); RACS820102 Average relative fractional occurrence in AR(i) (Rackovsky-Scheraga, 1982); RACS820103 Average relative fractional occurrence in AL(i) (Rackovsky-Scheraga, 1982); RACS820104 Average relative fractional occurrence in EL(i) (Rackovsky-Scheraga, 1982); RACS820105 Average relative fractional occurrence in E0(i) (Rackovsky-Scheraga, 1982); RACS820106 Average relative fractional occurrence in ER(i) (Rackovsky-Scheraga, 1982); RACS820107 Average relative fractional occurrence in A0(i−1) (Rackovsky-Scheraga, 1982); RACS820108 Average relative fractional occurrence in AR(i−1) (Rackovsky-Scheraga, 1982); RACS820109 Average relative fractional occurrence in AL(i−1) (Rackovsky-Scheraga, 1982); RACS820110 Average relative fractional occurrence in EL(i−1) (Rackovsky-Scheraga, 1982); RACS820111 Average relative fractional occurrence in E0(1-1) (Rackovsky-Scheraga, 1982); RACS820112 Average relative fractional occurrence in ER(i−1) (Rackovsky-Scheraga, 1982); RACS820113 Value of theta(i) (Rackovsky-Scheraga, 1982); RACS820114 Value of theta(i−1) (Rackovsky-Scheraga, 1982); RADA880101 Transfer free energy from chx to wat (Radzicka-Wolfenden, 1988); RADA880102 Transfer free energy from oct to wat (Radzicka-Wolfenden, 1988); RADA880103 Transfer free energy from vap to chx (Radzicka-Wolfenden, 1988); RADA880104 Transfer free energy from chx to oct (Radzicka-Wolfenden, 1988); RADA880105 Transfer free energy from vap to oct (Radzicka-Wolfenden, 1988); RADA880106 Accessible surface area (Radzicka-Wolfenden, 1988); RADA880107 Energy transfer from out to in (95% buried) (Radzicka-Wolfenden, 1988); RADA880108 Mean polarity (Radzicka-Wolfenden, 1988); RICJ880101 Relative preference value at N″ (Richardson-Richardson, 1988); RICJ880102 Relative preference value at N′ (Richardson-Richardson, 1988); RICJ880103 Relative preference value at N-cap (Richardson-Richardson, 1988); RICJ880104 Relative preference value at N1 (Richardson-Richardson, 1988); RICJ880105 Relative preference value at N2 (Richardson-Richardson, 1988); RICJ880106 Relative preference value at N3 (Richardson-Richardson, 1988); RICJ880107 Relative preference value at N4 (Richardson-Richardson, 1988); RICJ880108 Relative preference value at N5 (Richardson-Richardson, 1988); RICJ880109 Relative preference value at Mid (Richardson-Richardson, 1988); RICJ880110 Relative preference value at C5 (Richardson-Richardson, 1988); RICJ880111 Relative preference value at C4 (Richardson-Richardson, 1988); RICJ880112 Relative preference value at C3 (Richardson-Richardson, 1988); RICJ880113 Relative preference value at C2 (Richardson-Richardson, 1988); RICJ880114 Relative preference value at C1 (Richardson-Richardson, 1988); RICJ880115 Relative preference value at C-cap (Richardson-Richardson, 1988); RICJ880116 Relative preference value at C′ (Richardson-Richardson, 1988); RICJ880117 Relative preference value at C″ (Richardson-Richardson, 1988); ROBB760101 Information measure for alpha-helix (Robson-Suzuki, 1976); ROBB760102 Information measure for N-terminal helix (Robson-Suzuki, 1976); ROBB760103 Information measure for middle helix (Robson-Suzuki, 1976); ROBB760104 Information measure for C-terminal helix (Robson-Suzuki, 1976); ROBB760105 Information measure for extended (Robson-Suzuki, 1976); ROBB760106 Information measure for pleated-sheet (Robson-Suzuki, 1976); ROBB760107 Information measure for extended without H-bond (Robson-Suzuki, 1976); ROBB760108 Information measure for turn (Robson-Suzuki, 1976); ROBB760109 Information measure for N-terminal turn (Robson-Suzuki, 1976); ROBB760110 Information measure for middle turn (Robson-Suzuki, 1976); ROBB760111 Information measure for C-terminal turn (Robson-Suzuki, 1976); ROBB760112 Information measure for coil (Robson-Suzuki, 1976); ROBB760113 Information measure for loop (Robson-Suzuki, 1976); ROBB790101 Hydration free energy (Robson-Osguthorpe, 1979); ROSG850101 Mean area buried on transfer (Rose et al., 1985); ROSG850102 Mean fractional area loss (Rose et al., 1985); ROSM880101 Side chain hydropathy, uncorrected for solvation (Roseman, 1988); ROSM880102 Side chain hydropathy, corrected for solvation (Roseman, 1988); ROSM880103 Loss of Side chain hydropathy by helix formation (Roseman, 1988); SIMZ760101 Transfer free energy (Simon, 1976), Cited by Charton-Charton (1982); SNEP660101 Principal component I (Sneath, 1966); SNEP660102 Principal component II (Sneath, 1966); SNEP660103 Principal component III (Sneath, 1966); SNEP660104 Principal component IV (Sneath, 1966); SUEM840101 Zimm-Bragg parameter s at 20 C (Sueki et al., 1984); SUEM840102 Zimm-Bragg parameter sigma ×1.0E4 (Sueki et al., 1984); SWER830101 Optimal matching hydrophobicity (Sweet-Eisenberg, 1983); TANS770101 Normalized frequency of alpha-helix (Tanaka-Scheraga, 1977); TANS770102 Normalized frequency of isolated helix (Tanaka-Scheraga, 1977); TANS770103 Normalized frequency of extended structure (Tanaka-Scheraga, 1977); TANS770104 Normalized frequency of chain reversal R (Tanaka-Scheraga, 1977); TANS770105 Normalized frequency of chain reversal S (Tanaka-Scheraga, 1977); TANS770106 Normalized frequency of chain reversal D (Tanaka-Scheraga, 1977); TANS770107 Normalized frequency of left-handed helix (Tanaka-Scheraga, 1977); TANS770108 Normalized frequency of zeta R (Tanaka-Scheraga, 1977); TANS770109 Normalized frequency of coil (Tanaka-Scheraga, 1977) TANS770110 Normalized frequency of chain reversal (Tanaka-Scheraga, 1977); VASM830101 Relative population of conformational state A (Vasquez et al., 1983); VASM830102 Relative population of conformational state C (Vasquez et al., 1983); VASM830103 Relative population of conformational state E (Vasquez et al., 1983); VELV850101 Electron-ion interaction potential (Veljkovic et al., 1985); VENT840101 Bitterness (Venanzi, 1984); VHEG790101 Transfer free energy to lipophilic phase (von Heijne-Blomberg, 1979); WARP780101 Average interactions per side chain atom (Warme-Morgan, 1978); WEBA780101 RF value in high salt chromatography (Weber-Lacey, 1978); WERD780101 Propensity to be buried inside (Wertz-Scheraga, 1978); WERD780102 Free energy change of epsilon(i) to epsilon(ex) (Wertz-Scheraga, 1978); WERD780103 Free energy change of alpha(R1) to alpha(Rh) (Wertz-Scheraga, 1978); WERD780104 Free energy change of epsilon(i) to alpha(Rh) (Wertz-Scheraga, 1978); WOEC730101 Polar requirement (Woese, 1973); WOLR810101Hydration potential (Wolfenden et al., 1981); WOLS870101 Principal property value z1 (Wold et al., 1987); WOLS870102 Principal property value z2 (Wold et al., 1987); WOLS870103 Principal property value z3 (Wold et al., 1987); YUTK870101 Unfolding Gibbs energy in water, pH7.0 (Yutani et al., 1987); YUTK870102 Unfolding Gibbs energy in water, pH9.0 (Yutani et al., 1987); YUTK870103 Activation Gibbs energy of unfolding, pH7.0 (Yutani et al., 1987); YUTK870104 Activation Gibbs energy of unfolding, pH9.0 (Yutani et al., 1987); ZASB820101 Dependence of partition coefficient on ionic strength (Zaslaysky et al., 1982); ZIMJ680101 Hydrophobicity (Zimmerman et al., 1968); ZIMJ680102 Bulkiness (Zimmerman et al., 1968); ZIMJ680103 Polarity (Zimmerman et al., 1968); ZIMJ680104 Isoelectric point (Zimmerman et al., 1968); ZIMJ680105 RF rank (Zimmerman et al., 1968); AURR980101 Normalized positional residue frequency at helix termini N4′(Aurora-Rose, 1998); AURR980102 Normalized positional residue frequency at helix termini N′″ (Aurora-Rose, 1998); AURR980103Normalized positional residue frequency at helix termini N″ (Aurora-Rose, 1998); AURR980104 Normalized positional residue frequency at helix termini N′(Aurora-Rose, 1998); AURR980105 Normalized positional residue frequency at helix termini Nc (Aurora-Rose, 1998); AURR980106 Normalized positional residue frequency at helix termini N1 (Aurora-Rose, 1998); AURR980107 Normalized positional residue frequency at helix termini N2 (Aurora-Rose, 1998); AURR980108 Normalized positional residue frequency at helix termini N3 (Aurora-Rose, 1998); AURR980109 Normalized positional residue frequency at helix termini N4 (Aurora-Rose, 1998); AURR980110 Normalized positional residue frequency at helix termini N5 (Aurora-Rose, 1998); AURR980111 Normalized positional residue frequency at helix termini C5 (Aurora-Rose, 1998); AURR980112 Normalized positional residue frequency at helix termini C4 (Aurora-Rose, 1998); AURR980113 Normalized positional residue frequency at helix termini C3 (Aurora-Rose, 1998); AURR980114 Normalized positional residue frequency at helix termini C2 (Aurora-Rose, 1998); AURR980115 Normalized positional residue frequency at helix termini C1 (Aurora-Rose, 1998); AURR980116 Normalized positional residue frequency at helix termini Cc (Aurora-Rose, 1998); AURR980117 Normalized positional residue frequency at helix termini C′ (Aurora-Rose, 1998); AURR980118 Normalized positional residue frequency at helix termini C″ (Aurora-Rose, 1998); AURR980119 Normalized positional residue frequency at helix termini C′″ (Aurora-Rose, 1998); AURR980120 Normalized positional residue frequency at helix termini C4′ (Aurora-Rose, 1998); ONEK900101 Delta G values for the peptides extrapolated to 0 M urea (O'Neil-DeGrado, 1990); ONEK900102 Helix formation parameters (delta delta G) (O'Neil-DeGrado, 1990); VINM940101 Normalized flexibility parameters (B-values), average (Vihinen et al., 1994); VINM940102 Normalized flexibility parameters (B-values) for each residue surrounded by none rigid neighbours (Vihinen et al., 1994); VINM940103 Normalized flexibility parameters (B-values) for each residue surrounded by one rigid neighbours (Vihinen et al., 1994); VINM940104 Normalized flexibility parameters (B-values) for each residue surrounded by two rigid neighbours (Vihinen et al., 1994); MUNV940101 Free energy in alpha-helical conformation (Munoz-Serrano, 1994); MUNV940102 Free energy in alpha-helical region (Munoz-Serrano, 1994); MUNV940103 Free energy in beta-strand conformation (Munoz-Serrano, 1994); MUNV940104 Free energy in beta-strand region (Munoz-Serrano, 1994); MUNV940105 Free energy in beta-strand region (Munoz-Serrano, 1994) WIMW960101 Free energies of transfer of AcW1-X-LL peptides from bilayer interface to water (Wimley-White, 1996); KIMC930101 Thermodynamic beta sheet propensity (Kim-Berg, 1993); MONM990101 Turn propensity scale for transmembrane helices (Monne et al., 1999); BLAM930101 Alpha helix propensity of position 44 in T4 lysozyme (Blaber et al., 1993); PARS000101 p-Values of mesophilic proteins based on the distributions of B values (Parthasarathy-Murthy, 2000); PARS000102 p-Values of thermophilic proteins based on the distributions of B values (Parthasarathy-Murthy, 2000); KUMS000101 Distribution of amino acid residues in the 18 non-redundant families of thermophilic proteins (Kumar et al., 2000); KUMS000102 Distribution of amino acid residues in the 18 non-redundant families of mesophilic proteins (Kumar et al., 2000); KUMS000103 Distribution of amino acid residues in the alpha-helices in thermophilic proteins (Kumar et al., 2000); KUMS000104 Distribution of amino acid residues in the alpha-helices in mesophilic proteins (Kumar et al., 2000); TAKK010101 Side-chain contribution to protein stability (kJ/mol) (Takano-Yutani, 2001); FODMO20101 Propensity of amino acids within pi-helices (Fodje-Al-Karadaghi, 2002); NADH010101 Hydropathy scale based on self-information values in the two-state model (5% accessibility) (Naderi-Manesh et al., 2001); NADH010102 Hydropathy scale based on self-information values in the two-state model (9% accessibility) (Naderi-Manesh et al., 2001); NADH010103 Hydropathy scale based on self-information values in the two-state model (16% accessibility) (Naderi-Manesh et al., 2001); NADH010104 Hydropathy scale based on self-information values in the two-state model (20% accessibility) (Naderi-Manesh et al., 2001); NADH010105 Hydropathy scale based on self-information values in the two-state model (25% accessibility) (Naderi-Manesh et al., 2001); NADH010106 Hydropathy scale based on self-information values in the two-state model (36% accessibility) (Naderi-Manesh et al., 2001); NADH010107 Hydropathy scale based on self-information values in the two-state model (50% accessibility) (Naderi-Manesh et al., 2001); MONM990201 Averaged turn propensities in a transmembrane helix (Monne et al., 1999); KOEP990101 Alpha-helix propensity derived from designed sequences (Koehl-Levitt, 1999); KOEP990102 Beta-sheet propensity derived from designed sequences (Koehl-Levitt, 1999); CEDJ970101 Composition of amino acids in extracellular proteins (percent) (Cedano et al., 1997); CEDJ970102 Composition of amino acids in anchored proteins (percent) (Cedano et al., 1997); CEDJ970103 Composition of amino acids in membrane proteins (percent) (Cedano et al., 1997); CEDJ970104 Composition of amino acids in intracellular proteins (percent) (Cedano et al., 1997); CEDJ970105 Composition of amino acids in nuclear proteins (percent) (Cedano et al., 1997); FUKS010101 Surface composition of amino acids in intracellular proteins of thermophiles (percent) (Fukuchi-Nishikawa, 2001); FUKS010102 Surface composition of amino acids in intracellular proteins of mesophiles (percent) (Fukuchi-Nishikawa, 2001); FUKS010103 Surface composition of amino acids in extracellular proteins of mesophiles (percent) (Fukuchi-Nishikawa, 2001); FUKS010104 Surface composition of amino acids in nuclear proteins (percent) (Fukuchi-Nishikawa, 2001); FUKS010105 Interior composition of amino acids in intracellular proteins of thermophiles (percent) (Fukuchi-Nishikawa, 2001); FUKS010106 Interior composition of amino acids in intracellular proteins of mesophiles (percent) (Fukuchi-Nishikawa, 2001); FUKS010107 Interior composition of amino acids in extracellular proteins of mesophiles (percent) (Fukuchi-Nishikawa, 2001); FUKS010108 Interior composition of amino acids in nuclear proteins (percent) (Fukuchi-Nishikawa, 2001); FUKS010109 Entire chain composition of amino acids in intracellular proteins of thermophiles (percent) (Fukuchi-Nishikawa, 2001); FUKS010110 Entire chain composition of amino acids in intracellular proteins of mesophiles (percent) (Fukuchi-Nishikawa, 2001); FUKS010111 Entire chain composition of amino acids in extracellular proteins of mesophiles (percent) (Fukuchi-Nishikawa, 2001); FUKS010112 Entire chain composition of amino acids in nuclear proteins (percent) (Fukuchi-Nishikawa, 2001); AVBF000101 Screening coefficients gamma, local (Avbelj, 2000); AVBF000102 Screening coefficients gamma, non-local (Avbelj, 2000); AVBF000103 Slopes tripeptide, FDPB VFF neutral (Avbelj, 2000); AVBF000104 Slopes tripeptides, LD VFF neutral (Avbelj, 2000); AVBF000105 Slopes tripeptide, FDPB VFF noside (Avbelj, 2000); AVBF000106 Slopes tripeptide FDPB VFF all (Avbelj, 2000); AVBF000107 Slopes tripeptide FDPB PARSE neutral (Avbelj, 2000); AVBF000108 Slopes dekapeptide, FDPB VFF neutral (Avbelj, 2000); AVBF000109 Slopes proteins, FDPB VFF neutral (Avbelj, 2000); YANJ020101 Side-chain conformation by gaussian evolutionary method (Yang et al., 2002); MITS020101 Amphiphilicity index (Mitaku et al., 2002); TSAJ990101 Volumes including the crystallographic waters using the ProtOr (Tsai et al., 1999); TSAJ990102 Volumes not including the crystallographic waters using the ProtOr (Tsai et al., 1999); COSI940101 Electron-ion interaction potential values (Cosic, 1994); PONP930101 Hydrophobicity scales (Ponnuswamy, 1993); WILM950101 Hydrophobicity coefficient in RP-HPLC, C18 with 0.1% TFA/MeCN/H2O (Wilce et al. 1995); WILM950102 Hydrophobicity coefficient in RP-HPLC, C8 with 0.1% TFA/MeCN/H2O (Wilce et al. 1995); WILM950103 Hydrophobicity coefficient in RP-HPLC, C4 with 0.1% TFA/MeCN/H2O (Wilce et al. 1995); WILM950104 Hydrophobicity coefficient in RP-HPLC, C18 with 0.1% TFA/2-PrOH/MeCN/H2O (Wilce et al. 1995); KUHL950101 Hydrophilicity scale (Kuhn et al., 1995); GUOD860101 Retention coefficient at pH 2 (Guo et al., 1986); JURD980101 Modified Kyte-Doolittle hydrophobicity scale (Juretic et al., 1998); BASU050101 Interactivity scale obtained from the contact matrix (Bastolla et al., 2005); BASU050102 Interactivity scale obtained by maximizing the mean of correlation coefficient over single-domain globular proteins (Bastolla et al., 2005); BASU050103 Interactivity scale obtained by maximizing the mean of correlation coefficient over pairs of sequences sharing the TIM barrel fold (Bastolla et al., 2005); SUYM030101 Linker propensity index (Suyama-Ohara, 2003); PUNT030101 Knowledge-based membrane-propensity scale from 1D_Helix in MPtopo databases (Punta-Maritan, 2003); PUNT030102 Knowledge-based membrane-propensity scale from 3D_Helix in MPtopo databases (Punta-Maritan, 2003); GEOR030101 Linker propensity from all dataset (George-Heringa, 2003); GEOR030102 Linker propensity from 1-linker dataset (George-Heringa, 2003); GEOR030103 Linker propensity from 2-linker dataset (George-Heringa, 2003); GEOR030104 Linker propensity from 3-linker dataset (George-Heringa, 2003); GEOR030105 Linker propensity from small dataset (linker length is less than six residues) (George-Heringa, 2003); GEOR030106 Linker propensity from medium dataset (linker length is between six and 14 residues) (George-Heringa, 2003); GEOR030107 Linker propensity from long dataset (linker length is greater than 14 residues) (George-Heringa, 2003); GEOR030108 Linker propensity from helical (annotated by DSSP) dataset (George-Heringa, 2003); GEOR030109 Linker propensity from non-helical (annotated by DSSP) dataset (George-Heringa, 2003); ZHOH040101 The stability scale from the knowledge-based atom-atom potential (Zhou-Zhou, 2004); ZHOH040102 The relative stability scale extracted from mutation experiments (Zhou-Zhou, 2004); ZHOH040103 Buriability (Zhou-Zhou, 2004); BAEK050101 Linker index (Bae et al., 2005); HARY940101 Mean volumes of residues buried in protein interiors (Harpaz et al., 1994); PONJ960101 Average volumes of residues (Pontius et al., 1996); DIGM050101 Hydrostatic pressure asymmetry index, PAI (Di Giulio, 2005); WOLR790101 Hydrophobicity index (Wolfenden et al., 1979); OLSK800101 Average internal preferences (Olsen, 1980); KIDA850101 Hydrophobicity-related index (Kidera et al., 1985); GUYH850102 Apparent partition energies calculated from Wertz-Scheraga index (Guy, 1985); GUYH850103 Apparent partition energies calculated from Robson-Osguthorpe index (Guy, 1985); GUYH850104 Apparent partition energies calculated from Janin index (Guy, 1985); GUYH850105 Apparent partition energies calculated from Chothia index (Guy, 1985); ROSM880104 Hydropathies of amino acid side chains, neutral form (Roseman, 1988); ROSM880105 Hydropathies of amino acid side chains, pi-values in pH 7.0 (Roseman, 1988); JACR890101Weights from the IFH scale (Jacobs-White, 1989); COWR900101Hydrophobicity index, 3.0 pH (Cowan-Whittaker, 1990) BLAS910101 Scaled side chain hydrophobicity values (Black-Mould, 1991); CASG920101 Hydrophobicity scale from native protein structures (Casari-Sippl, 1992); CORJ870101 NNEIG index (Cornette et al., 1987); CORJ870102 SWEIG index (Cornette et al., 1987); CORJ870103 PRIFT index (Cornette et al., 1987); CORJ870104 PRILS index (Cornette et al., 1987); CORJ870105 ALTFT index (Cornette et al., 1987) CORJ870106 ALTLS index (Cornette et al., 1987); CORJ870107 TOTFT index (Cornette et al., 1987); CORJ870108 TOTLS index (Cornette et al., 1987); MIYS990101 Relative partition energies derived by the Bethe approximation (Miyazawa-Jernigan, 1999); MIYS990102 Optimized relative partition energies—method A (Miyazawa-Jernigan, 1999); MIYS990103 Optimized relative partition energies—method B (Miyazawa-Jernigan, 1999); MIYS990104 Optimized relative partition energies—method C (Miyazawa-Jernigan, 1999); MIYS990105 Optimized relative partition energies—method D (Miyazawa-Jernigan, 1999); ENGD860101 Hydrophobicity index (Engelman et al., 1986); and FASG890101 Hydrophobicity index (Fasman, 1989)

[0129] In some embodiments of the invention, degenerate oligonucleotides are used to synthesize one or more of the TN1, DH, N2, and/or H3-JH segments of the invention. In certain embodiments of the invention, the codon at or near the 5′ end of the oligonucleotide encoding the H3-JH segment is a degenerate codon. Such degenerate codons may be the first codon from the 5′ end, the second codon from the 5′ end, the third codon from the 5′ end, the fourth codon from the 5′ end, the fifth codon from the 5′ end, and/or any combination of the above. In some embodiments of the invention, one or more of the codons at or near the 5′ and/or 3′ ends of the DH segment are degenerate. Such degenerate codons may be the first codon from the 5′ and/or 3′ end(s), the second codon from the 5′ and/or 3′ end(s), the third codons from the 5′ and/or 3′ end(s), the fourth codon from the 5′ and/or 3′ end(s), the fifth codon from the 5′ and/or 3′ end(s), and/or any combination of the above. Degenerate codons used in each of the oligonucleotides encoding the segments may be selected for their ability to optimally recapitulate sequences in a theoretical segment pool and/or CDRH3 reference set.

[0130] In some embodiments, the invention provides methods of producing a theoretical segment pool of H3-JH segments, as described in the Examples. Theoretical segment pools generated utilizing NNN triplets, instead of or in addition to the NN doublets described in Example 5 also fall within the scope of the invention, as do synthetic libraries incorporating segments from these theoretical segment pools.

[0131] In some embodiments, the invention provides methods of producing a theoretical segment pool of DH segments, as described in the Examples. In particular, for example, the invention provides methods of producing a theoretical segment pool of DH segments described by the PYTHON program of Example 6. Example 6 describes the application of this program to produce the 68K theoretical segment pool (minimum length of DNA sequences after progressive deletions=4 bases; and minimum length of peptide sequences for inclusion in the theoretical segment pool=2). An alternative example is provided wherein the minimum length of the DNA sequences after progressive deletions was one base and the minimum length of the peptide sequence is one amino acid. It is also contemplated that other values could be used for these parameters. For example, the minimum length of the DNA sequences after progressive deletions could be set as 1, 2, 3, 4, 5, 6, 7, 8, 9, 10, 11, 12, 13, 14, or 15, and the minimum length of the peptide sequences in the theoretical segment pool could be set as 1, 2, 3, 4, or 5.

### Design of CDRH3 Libraries Using the TN1, DH, N2, and H3-JH Segments

[0132] The CDRH3 libraries of the invention comprise TN1, DH, N2, and H3-JH segments. Thus, in certain embodiments of the invention, the overall design of the CDRH3 libraries can be represented by the following formula:

[TN1]-[DH]-[N2]-[H3-JH].

[0133] In certain embodiments of the invention, a synthetic CDRH3 repertoire is combined with selected VH chassis sequences and heavy chain constant regions, via homologous recombination. Therefore, in certain embodiments of the invention, it may be desirable to include DNA sequences flanking the 5′ and 3′ ends of the synthetic CDRH3 libraries, to facilitate homologous recombination between the synthetic CDRH3 libraries and vectors containing the selected chassis and constant regions. In certain embodiments, the vectors also contain a sequence encoding at least a portion of the non-truncated region of the IGHJ gene (i.e., FRM4-JH). Thus, a polynucleotide encoding an N-terminal sequence (e.g., CA(K/R/T)) may be added to the synthetic CDRH3 sequences, wherein the N-terminal polynucleotide is homologous with FRM3 of the chassis, while a polynucleotide encoding a C-terminal sequence (e.g., WG(Q/R/K)G) may be added to the synthetic CDRH3, wherein the C-terminal polynucleotide is homologous with FRM4-JH. Although the sequence WG(Q/R)G is presented in this exemplary embodiment, additional amino acids, C-terminal to this sequence in FRM4-JH may also be included in the polynucleotide encoding the C-terminal sequence. The purpose of the polynucleotides encoding the N-terminal and C-terminal sequences, in this case, is to facilitate homologous recombination, and one of ordinary skill in the art would recognize that these sequences may be longer or shorter than depicted below. Accordingly, in certain embodiments of the invention, the overall design of the CDRH3 repertoire, including the sequences required to facilitate homologous recombination with the selected chassis, can be represented by the following formula (regions homologous with vector underlined):

CA[R/K/T]-[TN1]-[DH]-[N2]-[H3-JH]-[WG(Q/R/K)G].

[0134] In some embodiments of the invention, the CDRH3 repertoire can be represented by the following formula, which excludes the T residue presented in the schematic above:

CA[R/K]-[TN1]-[DH]-[N2]-[H3-JH]-[WG(Q/R/K)G].

[0135] References describing collections of V, D, and J genes include Scaviner et al., Exp. Clin, Immunogenet., 1999, 16: 243 and Ruiz et al., Exp. Clin. Immunogenet, 1999, 16: 173, each incorporated by reference in its entirety.

[0136] Although homologous recombination is one method of producing the libraries of the invention, a person of ordinary skill in the art will readily recognize that other methods of DNA assembly, such as ligation or site-specific recombination, and/or DNA synthesis, can also be used to produce the libraries of the invention.

### CDRH3 Lengths

[0137] The lengths of the segments may also be varied, for example, to produce libraries with a particular distribution of CDRH3 lengths. In one embodiment of the invention, the H3-JH segments are about 0 to about 10 amino acids in length, the DH segments are about 0 to about 12 amino acids in length, the TN1 segments are about 0 to about 4 amino acids in length, and the N2 segments are about 0 to about 4 amino acids in length. In certain embodiments, the H3-JH segments are at least about 0, 1, 2, 3, 4, 5, 6, 7, 8, 9, and/or 10 amino acids in length. In some embodiments, the DH segments are at least about 0, 1, 2, 3, 4, 5, 6, 7, 8, 9, 10, 11, and/or 12 amino acids in length. In certain embodiments, the TN1 segments are at least about 0, 1, 2, 3, or 4 amino acids in length. In some embodiments, the N2 amino acids are at least about 0, 1, 2, 3, or 4 amino acids in length. In certain embodiments of the invention, the CDRH3 is about 2 to about 35, about 2 to about 28, or about 5 to about 26 amino acids in length. In some embodiments, the CDRH3 is at least about 2, 3, 4, 5, 6, 7, 8, 9, 10, 11, 12, 13, 14, 15, 16, 17, 18, 19, 20, 21, 22, 23, 24, 25, 26, 27, 28, 29, 30, 31, 32, 33, 34, and/or 35 amino acids in length. In some embodiments, the length of any of the segments or CDRH3s of the invention may be less than a particular number of amino acids, where the number of amino acids is defined using any one of the integers provided above for the respective segment or CDRH3. In certain embodiments of the invention, a particular numerical range is defined, using any two of the integers provided above as lower and upper boundaries of the range, inclusive or exclusive. All combinations of the integers provided, which define an upper and lower boundary, are contemplated.

### Design of CDRL3 Libraries

[0138] The design of CDRL3 libraries, and light chain sequences, is described in detail in U.S. Publication Nos. 2009/0181855 and 2010/0056386, and WO/2009/036379, each of which is incorporated by reference in its entirety, and is therefore only described briefly herein. Libraries described herein are designed according to similar principles, with three important differences, namely that the libraries of the current invention contain (1) variability in CDRL1 and CDRL2; (2) variability in the framework regions; and/or (3) variability in CDRL3 that is designed to produce light chain libraries with CDRL3s that closely resemble human germline-like CDRL3 sequences, as defined above (Table 1).

[0139] A CDRL3 library of the invention may be a VKCDR3 library and/or a VλCDR3 library. In certain embodiments of the invention, patterns of occurrence of particular amino acids at defined positions within VL sequences are determined by analyzing data available in public or other databases, for example, the NCBI database (see, for example, WO/2009/036379). In certain embodiments of the invention, these sequences are compared on the basis of identity and assigned to families on the basis of the germline genes from which they are derived. The amino acid composition at each position of the sequence, in each germline family, may then be determined. This process is illustrated in the Examples provided herein.

Light Chains with Framework Variability

[0140] In some embodiments, the invention provides a library of light chain variable domains wherein the light chain variable domains are varied at one or more of framework positions 2, 4, 36, 46, 48, 49, and 66. In some embodiments, the invention provides a library of light chain variable domains comprising at least a plurality of light chain variable domains whose amino acid sequences are identical to one another except for substitutions at one or more of positions 2, 4, 36, 46, 48, 49, and 66. In certain embodiments, the invention provides a library of light chain variable domains comprising at least a plurality of light chain variable domains whose amino acid sequences are at least about 70%, 75%, 80%, 85%, 90%, 95%, 96%, 97%, 98%, 99%, and/or 99.5% to any of the light chain variable domain sequences disclosed herein, and further have substitutions at one or more of positions 2, 4, 36, 46, 48, 49, and 66. In some embodiments, the amino acids selected for inclusion in these positions are selected from amongst about the most 2, 3, 4, 5, 6, 7, 8, 9, and/or 10 most frequently occurring amino acids at the corresponding position in a reference set of light chain variable domains.

[0141] In some embodiments, the invention provides systems and methods of selecting framework positions to be varied in a light chain variable domain, comprising:
[0142] (i) obtaining a reference set of light chain sequences, wherein the reference set contains light chain sequences with VL segments selected from the group consisting of sequences found in, or encoded by, a single IGVL germline gene and/or sequences found in, or encoded by, allelic variants of the single IGVL germline gene;
[0143] (ii) determining which framework positions within the reference set have a degree of variability that is similar to the degree of variability occurring in one more CDR positions of the sequences in the reference set (e.g., the variability in a framework position is at least about 70%, 80%, 90%, or 95%, 100%, or more of the variability found in a CDR position of the sequences in the reference set);
[0144] (iii) determining the frequency of occurrence of amino acid residues for each of the framework positions identified in (ii);
[0145] (iv) synthesizing light chain variable domain encoding sequences wherein the framework positions identified in (ii) are varied to include the 2, 3, 4, 5, 6, 7, 8, 9, 10, 11, 12, 13, 14, 15, 16, 17, 18, 19, or 20 most frequently occurring amino acid residues (identified in (iii)) at the corresponding position.

[0146] One of ordinary skill in the art, reading the present disclosure will appreciate that the present invention provides analogous methods for developing framework variants of heavy chain sequences.

Light Chains with CDR1 and/or CDR2Variability

[0147] In some embodiments, the invention provides a library of light chain variable domains wherein the light chain variable domains are varied at one or more of CDRL1 positions 28, 29, 30, 30A, 30B, 30E, 31, and 32 (Chothia-Lesk numbering scheme; Chothia and Lesk, J. Mol. Biol., 1987, 196: 901). In some embodiments, the invention provides a library of light chain variable domains wherein the light chain variable domains are varied at one or more of CDRL2 positions 50, 51, 53, and 55. In some embodiments, the amino acids selected for inclusion in these CDRL1 and/or CDRL2 positions are selected from amongst about the most 2, 3, 4, 5, 6, 7, 8, 9, 10, 11, 12, 13, 14, 15, 16, 17, 18, 19, and/or 20 most frequently occurring amino acids at the corresponding position in a reference set of light chain variable domains.

[0148] In some embodiments, the invention provides systems and methods for selecting CDRL1 and/or CDRL2 positions to be varied in a light chain variable domain, comprising:
[0149] (i) obtaining a reference set of light chain sequences, wherein the reference set contains light chain sequences with VL segments selected from the group consisting of sequences found in, or encoded by, a single IGVL germline gene and sequences found in, or encoded by, allelic variants of the single IGVL germline gene;
[0150] (ii) determining which CDRL1 and/or CDRL2 positions are variable within the reference set;
[0151] (iii) synthesizing light chain variable domain encoding sequences wherein the CDRL1 and/or CDRL2 positions identified in (ii) are varied to include the 2, 3, 4, 5, 6, 7, 8, 9, 10, 11, 12, 13, 14, 15, 16, 17, 18, 19, or 20 most frequently occurring amino acid residues at the corresponding position.

[0152] One of ordinary skill in the art, reading the present disclosure will appreciate that the present invention provides analogous methods for developing CDRH2 and/or CDRH2 variants of heavy chain sequences.

### Light Chain Sequences

[0153] In some embodiments, the invention provides a light chain library comprising one or more of any of the light chain sequences provided herein, for example, the polypeptide sequences of Table 3 and/or Table 4 and/or the polynucleotide sequences of Table 5, Table 6, and/or Table 7. A person of ordinary skill in the art will recognize that not every light chain sequence provided herein is necessary to produce a functional light chain library of the invention. Therefore, in certain embodiments, a light chain library of the invention will contain a subset of the sequences described above. For example, in certain embodiments of the invention, at least about 10, 100, 200, 300, 400, 500, 600, 700, 800, 900, 10³, 10⁴, and/or 10⁵ of the light chain polynucleotide and/or polypeptide sequences provided herein are included in a library. In some embodiments, a library of the invention may contain less than a particular number of polynucleotide or polypeptide segments, where the number of segments is defined using any one of the integers provided above for the respective segment. In certain embodiments of the invention, a particular numerical range is defined, using any two of the integers provided above as lower and upper boundaries of the range, inclusive or exclusive. All combinations of the integers provided, which define an upper and lower boundary, are contemplated.

[0154] In certain embodiments, the invention provides light chain libraries comprising at least about 1%, 2.5%, 5%, 10%, 15%, 20%, 25%, 30%, 40%, 45%, 50%, 55%, 60%, 65%, 70%, 75%, 80%, 85%, 90%, 95%, or 99% of the sequences from any of the sets of light chain sequences provided herein. For example, the invention provides libraries comprising at least about 1%, 2.5%, 5%, 10%, 15%, 20%, 25%, 30%, 40%, 45%, 50%, 55%, 60%, 65%, 70%, 75%, 80%, 85%, 90%, 95%, or 99% of the light chain sequences provided in Table 3, Table 4, Table 5, Table 6, and/or Table 7. In some embodiments of the invention, a particular percentage range is defined, using any two of the percentages provided above as lower and upper boundaries of the range, inclusive or exclusive. All combinations of the percentages provided, which define an upper and lower boundary, are contemplated.

[0155] In some embodiments of the invention, at least about 1%, 2.5%, 5%, 10%, 15%, 20%, 25%, 30%, 40%, 45%, 50%, 55%, 60%, 65%, 70%, 75%, 80%, 85%, 90%, 95%, or 99% of the light chain sequences in a library are light chain sequences provided herein. In certain embodiments of the invention, at least about 1%, 2.5%, 5%, 10%, 15%, 20%, 25%, 30%, 40%, 45%, 50%, 55%, 60%, 65%, 70%, 75%, 80%, 85%, 90%, 95%, or 99% of the light chain sequences isolated from a light chain library (e.g., by binding to a particular antigen and/or generic ligand) are light chain sequences provided herein. In some embodiments, a light chain library of the invention may contain less than a particular percentage of light chain sequences provided herein, where the percentage of light chain sequences is defined using any one of the percentages provided above. In certain embodiments of the invention, a particular percentage range is defined, using any two of the percentages provided above as lower and upper boundaries of the range, inclusive or exclusive. All combinations of the percentages provided, which define an upper and lower boundary, are contemplated.

[0156] One of ordinary skill in the art will further recognize that given the light chain sequences provided herein, similar light chain sequences could be produced which share a designated level of overall sequence identity and/or one or more characteristic sequence elements described herein, which overall degree of sequence identity and/or characteristic sequence elements may confer common functional attributes. Those of ordinary skill in the art will be well familiar with a variety of techniques for preparing such related sequences, including the mutagenesis techniques provided herein. Therefore, each of the explicitly enumerated embodiments of the invention can also be practiced using light chain sequences that share a particular percent identity to any of the light chain sequences provided herein. For example, each of the previously described embodiments of the invention can be practiced using light chain sequences that are at least about 70%, 75%, 80%, 85%, 90%, 91%, 92%, 93%, 94%, 95%, 96%, 97%, 98%, 99%, 99.5%, or 99.9% identical to the light chain sequences provided herein. For example, in some embodiments, light chain libraries provided by the invention comprise light chain variable domains at least about 70%, 75%, 80%, 85%, 90%, 91%, 92%, 93%, 94%, 95%, 96%, 97%, 98%, 99%, 99.5%, or 99.9% identical to the light chain sequences provided herein, with substitutions in one or more of framework positions 2, 4, 36, 46, 48, 49, and 66, CDRL1 positions 28, 29, 30, 30A, 30B, 30E, 31, and 32 (Chothia-Lesk numbering scheme), and/or CDRL2 positions 50, 51, 53, and 55.

[0157] In some embodiments, the invention provides systems and methods for varying positions within the portion of CDRL3s encoded by a particular IGVL germline gene, comprising:
[0158] (i) obtaining a reference set of light chain sequences, wherein the reference set contains light chain sequences with VL segments originating from the same IGVL germline gene and/or its allelic variants;
[0159] (ii) determining which amino acids occur at each of the CDRL3 positions in the reference set that are encoded by the IGVL gene (i.e., positions 89-94, inclusive);
[0160] (iii) synthesizing light chain variable domain encoding sequences wherein two positions in each light chain variable domain encoding sequence contain degenerate codons encoding the 2, 3, 4, 5, 6, 7, 8, 9, 10, 11, 12, 13, 14, 15, 16, 17, 18, 19, or 20 most frequently occurring amino acid residues at the corresponding positions in the reference set.

[0161] As described in the examples, the degenerate codons of (iii) can be chosen to best reproduce the amino acid diversity contained in the reference set for each of the two positions varied in each light chain. Finally, while the methods and systems described above are described with respect to CDRL3, one of ordinary skill in the art will readily recognize that the same principles can be applied to CDRH1 and/or CDRH2 of the heavy chain, which are encoded entirely by the IGHV gene.

### CDRL3 Lengths

[0162] In some embodiments, as an alternative or in addition to other features described herein, the present invention provides libraries in which lengths of CDRL3s may be varied. The present invention therefore provides, among other things, libraries with a particular distribution of CDRL3 lengths. Although CDRL3 libraries of lengths 8, 9, and 10 are exemplified, one of ordinary skill in the art will readily recognize that the methods described herein can be applied to produce light chains with CDRL3s of different lengths (e.g., about 5, 6, 7, 11, 12, 13, 14, 15, and/or 16) that also fall within the scope of the invention. In some embodiments, the length of any of the CDRL3s of the invention may be less than a particular number of amino acids, where the number of amino acids is defined using any one of the integers provided above. In some embodiments of the invention, a particular numerical range is defined, using any two of the integers provided above as lower and upper boundaries of the range, inclusive or exclusive. All combinations of the integers provided, which define an upper and lower boundary, are contemplated.

### Synthetic Antibody Libraries

[0163] In some embodiments of the invention, provided libraries include one or more synthetic polynucleotides. In some embodiments, provided libraries may comprise synthetic polynucleotides selected from (a) heavy chain chassis polynucleotides; (b) light chain chassis polynucleotides; (c) CDR3 polynucleotides; (d) constant domain polynucleotides; and (e) combinations thereof. Those of ordinary skill in the art will appreciate that such synthetic polynucleotides may be linked to other synthetic or non-synthetic polynucleotides in provided libraries.

[0164] Synthetic polynucleotides provided herein may be prepared by any available method. For example, in some embodiments, synthetic polynucleotides can be synthesized by split pool DNA synthesis as described in Feldhaus et al., Nucleic Acids Research, 2000, 28: 534; Omstein et al., Biopolymers, 1978, 17: 2341; Brenner and Lerner, PNAS, 1992, 87: 6378, U.S. Publication Nos. 2009/0181855 and 2010/0056386, and WO/2009/036379 (each incorporated by reference in its entirety).

[0165] In some embodiments of the invention, segments representing the possible TN1, DH, N2, and JH diversity found in the human repertoire are synthesized de novo either as double-stranded DNA oligonucleotides, single-stranded DNA oligonucleotides representative of the coding strand, or single-stranded DNA oligonucleotides representative of the non-coding strand. Such sequences can then be introduced into a host cell along with an acceptor vector containing a chassis sequence and, in some cases a portion of FRM4 and a constant region. No primer-based PCR amplification from mammalian cDNA or mRNA or template-directed cloning steps from mammalian cDNA or mRNA need be employed.

### Construction of Libraries by Yeast Homologous Recombination

[0166] In certain embodiments, the invention exploits the inherent ability of yeast cells to facilitate homologous recombination at high efficiency. The mechanism of homologous recombination in yeast and its applications are briefly described below (also see e.g., U.S. Pat. Nos. 6,406,863; 6,410,246; 6,410,271; 6,610,472; and 7,700,302, each of which is incorporated by reference in its entirety).

[0167] As an illustrative embodiment, homologous recombination can be carried out in, for example, Saccharomyces cerevisiae, which has genetic machinery designed to carry out homologous recombination with high efficiency. Exemplary S. cerevisiae strains include EM93, CEN.PK2, RM11-1a, YJM789, and BJ5465. This mechanism is believed to have evolved for the purpose of chromosomal repair, and is also called “gap repair” or “gap filling”. By exploiting this mechanism, mutations can be introduced into specific loci of the yeast genome. For example, a vector carrying a mutant gene can contain two sequence segments that are homologous to the 5′ and 3′ open reading frame (ORF) sequences of a gene that is intended to be interrupted or mutated. The vector may also encode a positive selection marker, such as a nutritional enzyme allele (e.g., URA3) and/or an antibiotic resistant marker (e.g., Geneticin/G418), flanked by the two homologous DNA segments. Other selection markers and antibiotic resistance markers are known to one of ordinary skill in the art.

[0168] In some embodiments of the invention, this vector (e.g., a plasmid) is linearized and transformed into the yeast cells. Through homologous recombination between the plasmid and the yeast genome, at the two homologous recombination sites, a reciprocal exchange of the DNA content occurs between the wild type gene in the yeast genome and the mutant gene (including the selection marker gene(s)) that is flanked by the two homologous sequence segments. By selecting for the one or more selection markers, the surviving yeast cells will be those cells in which the wild-type gene has been replaced by the mutant gene (Pearson et al., Yeast, 1998, 14: 391, incorporated by reference in its entirety). This mechanism has been used to make systematic mutations in all 6,000 yeast genes, or open reading frames (ORFs), for functional genomics studies. Because the exchange is reciprocal, a similar approach has also been used successfully to clone yeast genomic DNA fragments into a plasmid vector (Iwasaki et al., Gene, 1991, 109: 81, incorporated by reference in its entirety).

[0169] By utilizing the endogenous homologous recombination machinery present in yeast, gene fragments or synthetic oligonucleotides can also be cloned into a plasmid vector without a ligation step. In this application of homologous recombination, a target gene fragment (i.e., the fragment to be inserted into a plasmid vector, e.g., a CDR3) is obtained (e.g., by oligonucleotides synthesis, PCR amplification, restriction digestion out of another vector, etc.). DNA sequences that are homologous to selected regions of the plasmid vector are added to the 5′ and 3′ ends of the target gene fragment. These homologous regions may be fully synthetic, or added via PCR amplification of a target gene fragment with primers that incorporate the homologous sequences. The plasmid vector may include a positive selection marker, such as a nutritional enzyme allele (e.g., URA3), or an antibiotic resistance marker (e.g., Geneticin/G418). The plasmid vector is then linearized by a unique restriction cut located in-between the regions of sequence homology shared with the target gene fragment, thereby creating an artificial gap at the cleavage site. The linearized plasmid vector and the target gene fragment flanked by sequences homologous to the plasmid vector are co-transformed into a yeast host strain. The yeast is then able to recognize the two stretches of sequence homology between the vector and target gene fragment and facilitate a reciprocal exchange of DNA content through homologous recombination at the gap. As a consequence, the target gene fragment is inserted into the vector without ligation.

[0170] The method described above has also been demonstrated to work when the target gene fragments are in the form of single stranded DNA, for example, as a circular M13 phage derived form, or as single stranded oligonucleotides (Simon and Moore, Mol. Cell. Biol., 1987, 7: 2329; Ivanov et al., Genetics, 1996, 142: 693; and DeMarini et al., 2001, 30: 520., each incorporated by reference in its entirety). Thus, the form of the target that can be recombined into the gapped vector can be double stranded or single stranded, and derived from chemical synthesis, PCR, restriction digestion, or other methods.

[0171] Several factors may influence the efficiency of homologous recombination in yeast. For example, the efficiency of the gap repair is correlated with the length of the homologous sequences flanking both the linearized vector and the target gene. In certain embodiments, about 20 or more base pairs may be used for the length of the homologous sequence, and about 80 base pairs may give a near-optimized result (Hua et al., Plasmid, 1997, 38: 91; Raymond et al., Genome Res., 2002, 12: 190, each incorporated by reference in its entirety). In certain embodiments of the invention, at least about 5, 10, 15, 20, 21, 22, 23, 24, 25, 26, 27, 28, 29, 30, 31, 32, 33, 34 35, 36, 37, 38, 39, 40, 45, 50, 55, 60, 65, 70, 75, 80, 85, 90, 95, 100, 110, 120, 130, 140, 150, 160, 170, 180, 187, 190, or 200 homologous base pairs may be used to facilitate recombination. In certain embodiments, between about 20 and about 40 base pairs are utilized. In addition, the reciprocal exchange between the vector and gene fragment is strictly sequence-dependent, i.e. it does not cause a frame shift. Therefore, gap-repair cloning assures the insertion of gene fragments with both high efficiency and precision. The high efficiency makes it possible to clone two, three, or more targeted gene fragments simultaneously into the same vector in one transformation attempt (Raymond et al., Biotechniques, 1999, 26: 134, incorporated by reference in its entirety). Moreover, the nature of precision sequence conservation through homologous recombination makes it possible to clone selected genes or gene fragments into expression or fusion vectors for direct functional examination (El-Deiry et al., Nature Genetics, 1992, 1: 4549; Ishioka et al., PNAS, 1997, 94: 2449, each incorporated by reference in its entirety).

[0172] Libraries of gene fragments have also been constructed in yeast using homologous recombination. For example, a human brain cDNA library was constructed as a two-hybrid fusion library in vector pJG4-5 (Guidotti and Zervos, Yeast, 1999, 15: 715, incorporated by reference in its entirety). It has also been reported that a total of 6,000 pairs of PCR primers were used for amplification of 6,000 known yeast ORFs for a study of yeast genomic protein interactions (Hudson et al., Genome Res., 1997, 7: 1169, incorporated by reference in its entirety). In 2000, Uetz et al. conducted a comprehensive analysis-of protein-protein interactions in Saccharomyces cerevisiae (Uetz et al., Nature, 2000, 403: 623, incorporated by reference in its entirety). The protein-protein interaction map of the budding yeast was studied by using a comprehensive system to examine two-hybrid interactions in all possible combinations between the yeast proteins (Ito et al., PNAS, 2000, 97: 1143, incorporated by reference in its entirety), and the genomic protein linkage map of Vaccinia virus was studied using this system (McCraith et al., PNAS, 2000, 97: 4879, incorporated by reference in its entirety).

[0173] In certain embodiments of the invention, a synthetic CDR3 (heavy or light chain) may be joined by homologous recombination with a vector encoding a heavy or light chain chassis, a portion of FRM4, and a constant region, to form a full-length heavy or light chain. In certain embodiments of the invention, the homologous recombination is performed directly in yeast cells. In some embodiments, such a method comprises:
[0174] (a) transforming into yeast cells:
   [0175] (i) a linearized vector encoding a heavy or light chain chassis, a portion of FRM4, and a constant region, wherein the site of linearization is between the end of FRM3 of the chassis and the beginning of the constant region; and
   [0176] (ii) a library of CDR3 insert nucleotide sequences that are linear and double stranded, wherein each of the CDR3 insert sequences comprises a nucleotide sequence encoding CDR3 and 5′- and 3′-flanking sequences that are sufficiently homologous to the termini of the vector of (i) at the site of linearization to enable homologous recombination to occur between the vector and the library of CDR3 insert sequences; and
[0177] (b) allowing homologous recombination to occur between the vector and the CDR3 insert sequences in the transformed yeast cells, such that the CDR3 insert sequences are incorporated into the vector, to produce a vector encoding full-length heavy chain or light chain.

[0178] As specified above, CDR3 inserts may have a 5′ flanking sequence and a 3′ flanking sequence that are homologous to the termini of the linearized vector. When the CDR3 inserts and the linearized vectors are introduced into a host cell, for example, a yeast cell, the “gap” (the linearization site) created by linearization of the vector is filled by the CDR3 fragment insert through recombination of the homologous sequences at the 5′ and 3′ termini of these two linear double-stranded DNAs (i.e., the vector and the insert). Through this event of homologous recombination, libraries of circular vectors encoding full-length heavy or light chains comprising variable CDR3 inserts is generated. Particular instances of these methods are presented in the Examples.

[0179] Subsequent analysis may be carried out to determine, for example, the efficiency of homologous recombination that results in correct insertion of the CDR3 sequences into the vectors. For example, PCR amplification of the CDR3 inserts directly from selected yeast clones may reveal how many clones are recombinant. In certain embodiments, libraries with minimum of about 90% recombinant clones are utilized. In certain embodiments libraries with a minimum of about 1%, 5% 10%, 15%, 20%, 25%, 30%, 35%, 40%, 45%, 50%, 55%, 60%, 65%, 70%, 75%, 80%, 85%, 86%, 87%, 88%, 89%, 90%, 91%, 92%, 93%, 94%, 95%, 96%, 97%, 98%, or 99% recombinant clones are utilized. The same PCR amplification of selected clones may also reveal the insert size.

[0180] To verify the sequence diversity of the inserts in the selected clones, a PCR amplification product with the correct size of insert may be “fingerprinted” with restriction enzymes known to cut or not cut within the amplified region. From a gel electrophoresis pattern, it may be determined whether the clones analyzed are of the same identity or of the distinct or diversified identity. The PCR products may also be sequenced directly to reveal the identity of inserts and the fidelity of the cloning procedure, and to prove the independence and diversity of the clones.

### Expression and Screening Systems

[0181] Libraries of polynucleotides generated by any of the techniques described herein, or other suitable techniques, can be expressed and screened to identify antibodies having desired structure and/or activity. Expression of the antibodies can be carried out, for example, using cell-free extracts (and e.g., ribosome display), phage display, prokaryotic cells (e.g., bacterial display), or eukaryotic cells (e.g., yeast display). In certain embodiments of the invention, the antibody libraries are expressed in yeast.

[0182] In some embodiments, polynucleotides are engineered to serve as templates that can be expressed in a cell-free extract. Vectors and extracts as described, for example in U.S. Pat. Nos. 5,324,637; 5,492,817; 5,665,563, (each incorporated by reference in its entirety) can be used and many are commercially available. Ribosome display and other cell-free techniques for linking a polynucleotide (i.e., a genotype) to a polypeptide (i.e., a phenotype) can be used, e.g., Profusion™ (see, e.g., U.S. Pat. Nos. 6,348,315; 6,261,804; 6,258,558; and 6,214,553, each incorporated by reference in its entirety).

[0183] Alternatively or additionally, polynucleotides of the invention can be expressed in an E. coli expression system, such as that described by Pluckthun and Skerra. (Meth. Enzymol., 1989, 178: 476; Biotechnology, 1991, 9: 273, each incorporated by reference in its entirety). Mutant proteins can be expressed for secretion in the medium and/or in the cytoplasm of the bacteria, as described by Better and Horwitz, Meth. Enzymol., 1989, 178: 476, incorporated by reference in its entirety. In some embodiments, the single domains encoding VH and VL are each attached to the 3′ end of a sequence encoding a signal sequence, such as the ompA, phoA or pelB signal sequence (Lei et al., J. Bacteriol., 1987, 169: 4379, incorporated by reference in its entirety). These gene fusions are assembled in a dicistronic construct, so that they can be expressed from a single vector, and secreted into the periplasmic space of E. coli where they will refold and can be recovered in active form. (Skerra et al., Biotechnology, 1991, 9: 273, incorporated by reference in its entirety). For example, antibody heavy chain genes can be concurrently expressed with antibody light chain genes to produce antibodies or antibody fragments.

[0184] In some embodiments of the invention, antibody sequences are expressed on the membrane surface of a prokaryote, e.g., E. coli, using a secretion signal and lipidation moiety as described, e.g., in US2004/0072740; US2003/0100023; and US2003/0036092 (each incorporated by reference in its entirety).

[0185] Higher eukaryotic cells, such as mammalian cells, for example myeloma cells (e.g., NS/0 cells), hybridoma cells, Chinese hamster ovary (CHO), and human embryonic kidney (HEK) cells, can also be used for expression of the antibodies of the invention. Typically, antibodies expressed in mammalian cells are designed to be secreted into the culture medium, or expressed on the surface of the cell. Antibody or antibody fragments can be produced, for example, as intact antibody molecules or as individual VH and VL fragments, Fab fragments, single domains, or as single chains (scFv) (Huston et al., PNAS, 1988, 85: 5879, incorporated by reference in its entirety).

[0186] Alternatively or additionally, antibodies can be expressed and screened by anchored periplasmic expression (APEx 2-hybrid surface display), as described, for example, in Jeong et al., PNAS, 2007, 104: 8247 (incorporated by reference in its entirety) or by other anchoring methods as described, for example, in Mazor et al., Nature Biotechnology, 2007, 25: 563 (incorporated by reference in its entirety).

[0187] In some embodiments of the invention, antibodies can be selected using mammalian cell display (Ho et al., PNAS, 2006, 103: 9637, incorporated by reference in its entirety).

[0188] Screening of the antibodies derived from the libraries of the invention can be carried out by any appropriate means. For example, binding activity can be evaluated by standard immunoassay and/or affinity chromatography. Screening of antibodies of the invention for catalytic function, e.g., proteolytic function can be accomplished using a standard assays, e.g., the hemoglobin plaque assay as described in U.S. Pat. No. 5,798,208 (incorporated by reference in its entirety). Determining the ability of candidate antibodies to bind therapeutic targets can be assayed in vitro using, e.g., a BIACORE™ instrument, which measures binding rates of an antibody to a given target or antigen based on surface plasmon resonance. In vivo assays can be conducted using any of a number of animal models and then subsequently tested, as appropriate, in humans. Cell-based biological assays are also contemplated.

[0189] One feature of the instant invention is the speed at which the antibodies of the library can be expressed and screened. In certain embodiments of the invention, the antibody library can be expressed in yeast, which have a doubling time of less than about 3, 4, 5, 6, 7, 8, 9, 10, 11, 12, 13, 14, 15, 16, 17, 18, 19, 20, 21, 22, 23, or 24 hours. In some embodiments, the doubling times are about 1 to about 3 hours, about 2 to about 4, about 3 to about 8 hours, about 3 to about 24, about 5 to about 24, about 4 to about 6 about 5 to about 22, about 6 to about 8, about 7 to about 22, about 8 to about 10 hours, about 7 to about 20, about 9 to about 20, about 9 to about 18, about 11 to about 18, about 11 to about 16, about 13 to about 16, about 16 to about 20, or about 20 to about 30 hours. In certain embodiments of the invention, an antibody library is expressed in yeast with a doubling time of about 16 to about 20 hours, about 8 to about 16 hours, or about 4 to about 8 hours. Thus, an antibody library of the instant invention can be expressed and screened in a matter of hours, as compared to previously known techniques which take several days to express and screen antibody libraries. A limiting step in the throughput of such screening processes in mammalian cells is typically the time required to iteratively regrow populations of isolated cells, which, in some cases, have doubling times greater than the doubling times of the yeast used in the current invention.

[0190] In certain embodiments of the invention, the composition of a library may be defined after one or more enrichment steps (for example by screening for antigen binding, binding to a generic ligand, or other properties). For example, a library with a composition comprising about ×% sequences or libraries of the invention may be enriched to contain about 2×%, 3×%, 4×%, 5×%, 6×%, 7×%, 8×%, 9×%, 10×%, 20×%, 25×%, 40×%, 50×%, 60×% 75×%, 80×%, 90×%, 95×%, or 99×% sequences or libraries of the invention, after one or more screening steps. In some embodiments of the invention, the sequences or libraries of the invention may be enriched about 2-fold, 3-fold, 4-fold, 5-fold, 6-fold, 7-fold, 8-fold, 9-fold, 10-fold, 100-fold, 1,000-fold, or more, relative to their occurrence prior to the one or more enrichment steps. In certain embodiments of the invention, a library may contain at least a certain number of a particular type of sequence(s), such as CDRH3s, CDRL3s, heavy chains, light chains, or whole antibodies (e.g., at least about 10³, 10⁴, 10⁵, 10⁶, 10⁷, 10⁸, 10⁹, 10¹⁰, 10¹¹, 10¹², 10¹³, 10¹⁴, 10¹⁵, 10¹⁶, 10¹⁷, 10¹⁸, 10¹⁹, or 10²⁰). In certain embodiments, these sequences may be enriched during one or more enrichment steps, to provide libraries comprising at least about 10², 10³, 10⁴, 10⁵, 10⁶, 10⁷, 10⁸, 10⁹, 10¹⁰, 10¹¹, 10¹², 10¹³, 10¹⁴, 10¹⁵, 10¹⁶, 10¹⁷, 10¹⁸, or 10¹⁹ of the respective sequence(s).

### Mutagenesis Approaches for Affinity Maturation

[0191] As described above, antibody leads can be identified through a selection process that involves screening the antibodies of a library of the invention for binding to one or more antigens, or for a biological activity. Coding sequences of these antibody leads may be further mutagenized in vitro or in vivo to generate secondary libraries with diversity introduced in the context of the initial antibody leads. Such mutagenized antibody leads can then be further screened for binding to target antigens or biological activity, in vitro or in vivo, following procedures similar to those used for the selection of the initial antibody lead from the primary library. Such mutagenesis and selection of primary antibody leads effectively mimics the affinity maturation process naturally occurring in a mammal that produces antibodies with progressive increases in the affinity to an antigen.

[0192] In some embodiments of the invention, only the CDRH3 region is mutagenized. In some embodiments of the invention, the whole variable region is mutagenized. In some embodiments of the invention one or more of CDRH1, CDRH2, CDRH3, CDRL1, CDRL2, and/CDRL3 may be mutagenized. In some embodiments of the invention, “light chain shuffling” may be used as part of the affinity maturation protocol. In certain embodiments, this may involve pairing one or more heavy chains with a number of light chains, to select light chains that enhance the affinity and/or biological activity of an antibody. In certain embodiments of the invention, the number of light chains to which the one or more heavy chains can be paired is at least about 2, 5, 10, 100, 10³, 10⁴, 10⁵, 10⁶, 10⁷, 10⁸, 10⁹, or 10¹⁰. In certain embodiments of the invention, these light chains are encoded by plasmids. In some embodiments of the invention, the light chains may be integrated into the genome of the host cell.

[0193] Coding sequences of antibody leads may be mutagenized using any of wide variety of methods. Examples of methods of mutagenesis include, but are not limited to site-directed mutagenesis, error-prone PCR mutagenesis, cassette mutagenesis, and random PCR mutagenesis. Alternatively or additionally, oligonucleotides encoding regions with the desired mutations can be synthesized and introduced into the sequence to be mutagenized, for example, via recombination or ligation.

[0194] Site-directed mutagenesis or point mutagenesis may be used to gradually change the CDR sequences in specific regions. For example, this may be accomplished by using oligonucleotide-directed mutagenesis or PCR. For example, a short sequence of an antibody lead may be replaced with a synthetically mutagenized oligonucleotide in either the heavy chain or light chain region, or both. Such a method may not be efficient for mutagenizing large numbers of CDR sequences, but may be used for fine tuning of a particular lead to achieve higher affinity toward a specific target protein.

[0195] Cassette mutagenesis may alternatively or additionally be used to mutagenize the CDR sequences in specific regions. In a typical cassette mutagenesis, a sequence block, or a region, of a single template is replaced by a completely or partially randomized sequence. However, the maximum information content that can be obtained may be statistically limited by the number of random sequences of the oligonucleotides. Similar to point mutagenesis, this method may also be used for fine tuning of a particular lead to achieve higher affinity towards a specific target protein.

[0196] Error-prone PCR, or “poison” PCR, may be used to mutagenize the CDR sequences, for example, by following protocols described in U.S. Pat. No. 6,153,745; Caldwell and Joyce, PCR Methods and Applications, 1992, 2: 28; Leung et al., Technique, 1989, 1: 11; Shafikhani et al., Biotechniques, 1997, 23: 304; and Stemmer et al., PNAS, 1994, 91: 10747 (each of which is incorporated by reference in its entirety).

[0197] Conditions for error prone PCR may include, for example, (a) high concentrations of Mn² (e.g., about 0.4 to about 0.6 mM) that efficiently induces malfunction of Taq DNA polymerase; and/or (b) a disproportionally high concentration of one nucleotide substrate (e.g., dGTP) in the PCR reaction that causes incorrect incorporation of this high concentration substrate into the template and produces mutations. Alternatively or additionally, other factors such as, the number of PCR cycles, the species of DNA polymerase used, and the length of the template, may affect the rate of misincorporation of “wrong” nucleotides into the PCR product. Commercially available kits may be utilized for the mutagenesis of the selected antibody library, such as the “Diversity PCR random mutagenesis kit” (CLONTECH™).

[0198] Primer pairs used in PCR-based mutagenesis may, in certain embodiments, include regions matched with the homologous recombination sites in the expression vectors. Such a design allows facile re-introduction of the PCR products back into the heavy or light chain chassis vectors, after mutagenesis, via homologous recombination.

[0199] Other PCR-based mutagenesis methods can also be used, alone or in conjunction with the error prone PCR described above. For example, the PCR amplified CDR segments may be digested with DNase to create nicks in the double stranded DNA. These nicks can be expanded into gaps by other exonucleases such as Bal 31. Gaps may then be filled by random sequences by using DNA Klenow polymerase at a low concentration of regular substrates dGTP, dATP, dTTP, and dCTP with one substrate (e.g., dGTP) at a disproportionately high concentration. This fill-in reaction should produce high frequency mutations in the filled gap regions. Such methods of DNase digestion may be used in conjunction with error prone PCR to create a high frequency of mutations in the desired CDR segments.

[0200] CDR or antibody segments amplified from the primary antibody leads may also be mutagenized in vivo by exploiting the inherent ability of mutation in pre-B cells. The Ig genes in pre-B cells are specifically susceptible to a high-rate of mutation. The Ig promoter and enhancer facilitate such high rate mutations in a pre-B cell environment while the pre-B cells proliferate. Accordingly, CDR gene segments may be cloned into a mammalian expression vector that contains a human Ig enhancer and promoter. Such a construct may be introduced into a pre-B cell line, such as 38B9, which allows the mutation of the VH and VL gene segments naturally in the pre-B cells (Liu and Van Ness, Mol. Immunol., 1999, 36: 461, incorporated by reference in its entirety). The mutagenized CDR segments can be amplified from the cultured pre-B cell line and re-introduced back into the chassis-containing vector(s) via, for example, homologous recombination.

[0201] In some embodiments, a CDR “hit” isolated from screening the library can be re-synthesized, for example using degenerate codons or trinucleotides, and re-cloned into the heavy or light chain vector using gap repair.

### Other Variants of Polynucleotide Sequences of the Invention

[0202] In certain embodiments, the invention provides a polynucleotide that hybridizes with a polynucleotide taught herein, or that hybridizes with the complement of a polynucleotide taught herein. For example, an isolated polynucleotide that remains hybridized after hybridization and washing under low, medium, or high stringency conditions to a polynucleotide taught herein or the complement of a polynucleotide taught herein is encompassed by the present invention.

[0203] Exemplary low stringency conditions include hybridization with a buffer solution of about 30% to about 35% formamide, about 1 M NaCl, about 1% SDS (sodium dodecyl sulphate) at about 37° C., and a wash in about 1× to about 2×SSC (20×SSC=3.0 M NaCl/0.3 M trisodium citrate) at about 50° C. to about 55° C.

[0204] Exemplary moderate stringency conditions include hybridization in about 40% to about 45% formamide, about 1 M NaCl, about 1% SDS at about 37° C., and a wash in about 0.5× to about 1×SSC at abut 55° C. to about 60° C.

[0205] Exemplary high stringency conditions include hybridization in about 50% formamide, about 1 M NaCl, about 1% SDS at about 37° C., and a wash in about 0.1×SSC at about 60° C. to about 65° C.

[0206] Optionally, wash buffers may comprise about 0.1% to about 1% SDS.

[0207] The duration of hybridization is generally less than about 24 hours, usually about 4 to about 12 hours.

### Sublibraries and Larger Libraries Comprising Libraries or Sub-Libraries of the Invention

[0208] Libraries comprising combinations of the libraries described herein (e.g., CDRH3 and CDRL3 libraries) are encompassed by the invention. Sublibraries comprising portions of the libraries described herein are also encompassed by the invention (e.g., a CDRH3 library in a particular heavy chain chassis or a sub-set of the CDRH3 libraries, for example based on length).

[0209] Moreover, libraries containing one of the libraries or sublibraries of the invention also fall within the scope of the invention. For example, in certain embodiments of the invention, one or more libraries or sublibraries of the invention may be contained within a larger library (theoretical or physical), which may include sequences derived by other means, for example, non-human or human sequence derived by stochastic or sitewise-stochastic synthesis. In certain embodiments of the invention, at least about 1% of the sequences in a polynucleotide library may be those of the invention (e.g., CDRH3 sequences, CDRL3 sequences, VH sequences, VL sequences), regardless of the composition of the other 99% of sequences. For the purposes of illustration only, one of ordinary skill in the art would readily recognize that a library containing 10⁹ total members, where 10⁷ members are members of the libraries of the invention (i.e., 1%) would have utility, and that members of the libraries of the invention could be isolated from such a library. In some embodiments of the invention, at least about 0.001%, 0.01%, 0.1%, 2%, 5%, 10%, 20%, 30%, 40%, 50%, 60%, 70%, 80%, 81%, 82%, 83%, 84%, 85%, 86%, 87%, 88%, 89%, 90%, 91,%, 92%, 93%, 94%, 95%, 96%, 97%, 98% or 99% of the sequences in any polynucleotide library may be those of the invention, regardless of the composition of the other sequences. In some embodiments, the sequences of the invention may comprise about 0.001% to about 1%, about 1% to about 2%, about 2% to about 5%, about 5% to about 10%, about 10% to about 15%, about 15% to about 20%, about 20% to about 25%, about 25% to about 30%, about 30% to about 35%, about 35% to about 40%, about 40% to about 45%, about 45% to about 50%, about 50% to about 55%, about 55% to about 60%, about 60% to about 65%, about 65% to about 70%, about 70% to about 75%, about 75% to about 80%, about 80% to about 85%, about 85% to about 90%, about 90% to about 95%, or about 95% to about 99% of the sequences in any polynucleotide library, regardless of the composition of the other sequences. Thus, libraries more diverse than one or more libraries or sublibraries of the invention, but yet still comprising one or more libraries or sublibraries of the invention, in an amount in which the one or more libraries or sublibraries of the invention can be effectively screened and from which sequences encoded by the one or more libraries or sublibraries of the invention can be isolated, also fall within the scope of the invention.

### Alternative Scaffolds

[0210] As would be evident to one of ordinary skill in the art, the CDRH3 and/or CDRL3 polypeptides provided by the invention may also be displayed on alternative scaffolds. Several such scaffolds have been shown to yield molecules with specificities and affinities that rival those of antibodies. Exemplary alternative scaffolds include those derived from fibronectin (e.g., AdNectin), the β-sandwich (e.g., iMab), lipocalin (e.g., Anticalin), EETI-II/AGRP, BPTI/LACI-D1/ITI-D2 (e.g., Kunitz domain), thioredoxin (e.g., peptide aptamer), protein A (e.g., Affibody), ankyrin repeats (e.g., DARPin), γB-crystallin/ubiquitin (e.g., Affilin), CTLD₃ (e.g., Tetranectin), and (LDLR-A module)₃ (e.g., Avimers). Additional information on alternative scaffolds is provided, for example, in Binz et al., Nat. Biotechnol., 2005 23: 1257 and Skerra, Current Opin. in Biotech., 2007 18: 295-304, each of which is incorporated by reference in its entirety.

### Additional Embodiments of the Invention

### Library Sizes

[0211] In some embodiments of the invention, a library comprises about 10¹ to about 10²⁰ different polynucleotide or polypeptide sequences (encoding or comprising e.g., antibodies, heavy chains, CDRH3s, light chains, and/or CDRL3s). In some embodiments, the libraries of the invention are designed to include at least about 10¹, 10², 10³, 10⁴, 10⁵, 10⁶, 10⁷, 10⁸, 10⁹, 10¹⁰, 10¹¹, 10¹², 10¹³, 10¹⁴, 10¹⁵, 10¹⁶, 10¹⁷, 10¹⁸, 10¹⁹, or 10²⁰, or more different antibody, heavy chain, CDRH3, light chain, and/or CDRL3 polynucleotide or polypeptide sequences. In some embodiments, a library of the invention may contain less than a particular number of polynucleotide or polypeptide sequences, where the number of sequences is defined using any one of the integers provided above. In certain embodiments of the invention, a particular numerical range is defined, using any two of the integers provided above as lower and upper boundaries of the range, inclusive or exclusive. All combinations of the integers provided, which define an upper and lower boundary, are contemplated.

[0212] In some embodiments, the invention provides libraries wherein a fraction of the members of the library are members produced according to the methods, systems, and compositions provided herein. One important property of the libraries of the invention is that they favorably mimic certain aspects of the human preimmune repertoire, including length diversity and sequence diversity. One or ordinary skill in the art will readily recognize that libraries provided by the invention include libraries where a subset of the members of the library are members produced according to the methods, systems, and compositions provided herein. For example, a library containing 10⁸ members wherein 10⁶ members are produced according to the methods, systems, and compositions provided herein, would contain 1% sequences produced according to the methods, systems, and compositions provided herein. One of ordinary skill in the art would recognize that one or more of the 10⁶ members could readily be isolated using screening techniques known in the art. Therefore, said libraries fall within the scope of the invention. More specifically, libraries comprising at least about 1%, 2.5%, 5%, 10%, 15%, 20%, 25%, 30%, 40%, 45%, 50%, 55%, 60%, 65%, 70%, 75%, 80%, 85%, 90%, 95%, or 99% CDRH3, CDRL3, light chain, or heavy chain, and/or full-length antibody sequences provided herein fall within the scope of the invention. Libraries comprising at least about 10³, 10⁴, 10⁵, 10⁶, 10⁷, 10⁸, 10⁹, 10¹⁰, 10¹¹, 10¹², 10¹³, 10¹⁴, 10¹⁵ CDRH3, CDRL3, light chain, heavy chain, and/or full-length antibody sequences provided herein also fall within the scope of the invention.

### Human Preimmune Set

[0213] In some embodiments, the invention comprises the set of 3,571 curated human preimmune antibody sequences contained within the HPS, their corresponding CDRH3 sequences (Appendix A), and/or a representation of these CDRH3 sequences (and/or TN1, DH, N2, and/or H3-JH segments thereof) in a computer readable format. In certain embodiments, the invention comprises a method of producing a CDRH3 library, the method comprising matching candidate segments (i.e., TN1, DH, N2, and H3-JH) from a theoretical segment pool with CDRH3 sequences in the HPS and/or any other repertoire of CDRH3 sequences. In some embodiments, the invention comprises the candidate segments from the theoretical segment pools disclosed herein and/or the segments selected for inclusion in a physical library.

### Embodiments

[0214] While the methods described herein demonstrate the production of theoretical segment pools of H3-JH and DH segments using a limited number of allelic variants, one of ordinary skill in the art will recognize that methods taught herein may be applied to any IGHJ and IGHD genes, including any other allelic variants and all non-human IGHJ and IGHD genes. Alternatively or additionally, methods described herein may be applied to any reference set of CDRH3 sequences, for example to extract additional TN1 and/or N2 segments. Alternatively or additionally, one of ordinary skill in the art will recognize that each of the described embodiments of the invention may be in polynucleotide or polypeptide form, within a vector, virus, or microorganism (e.g., a yeast or bacteria). Furthermore, since the invention involves synthetic libraries that are fully enumerated, certain embodiments of the invention relate to any of the embodiments described above in a computer readable format, and uses thereof.

[0215] Non-human antibody libraries also fall within the scope of the invention.

[0216] The present disclosure describes the removal of sequences containing Cys residues, N-linked glycosylation motifs, deamidation motifs, and highly hydrophobic sequences from the libraries of the invention. One of ordinary skill in the art will recognize that one or more of these criteria (i.e., not necessarily all) can be applied to remove undesirable sequences from any library of the invention. However, libraries containing one or more of these types of sequences also fall within the scope of the invention. Other criteria can also be used; those described herein are not limiting.

[0217] In certain embodiments, the invention provides libraries in which the number of times a particular sequence is repeated within the library (either theoretical, synthetic, or physical realization) is limited. For example, in some embodiments, the invention provides libraries wherein the frequency of occurrence of any of the sequences in the library (e.g., CDRH3, CDRL3, heavy chain, light chain, full-length antibody) is less than about 2, 5, 10, 15, 20, 25, 30, 35, 40, 45, 50, 55, 60, 65, 70, 75, 80, 85, 90, 95, 100, 200, 300, 400, 500, 600, 700, 800, 900, or 1000. In some embodiments, the frequency of occurrence of any of the sequences in the library is less than a multiple of the frequency of occurrence of any other sequence in the library, for examples less than about 2, 5, 10, 15, 20, 25, 30, 35, 40, 45, 50, 55, 60, 65, 70, 75, 80, 85, 90, 95, 100, 200, 300, 400, 500, 600, 700, 800, 900, or 1000 times the frequency of occurrence of any other sequence in the library.

[0218] In some embodiments, libraries are defined by the combinatorial diversity of the segments used to produce CDRH3 sequences, in particular the number of non-degenerate segment combinations that can be used to produce a particular CDRH3 sequence. In some embodiments, this metric may be calculated using, for example, a sample of about 2000, 5000, 10000, 20000, 50000, 100000, or more sequences from the CDRH3 library and “self-matching” using the segments used to generate the CDRH3 sequences of that library. In certain embodiments, the invention provides libraries wherein at least about 95%, 90%, 85%, 80%, 75%, 70%, 65%, 60%, 55%, 50%, 45%, 40%, 35%, 30%, 25%, 20%, 15%, 10%, or 5% of the CDRH3 sequences in the library may be formed by a single combination of segments.

[0219] In certain embodiments of the invention, a statistical bootstrap analysis was used to generate CDRH3 reference sets. While it may be advantageous to use this method, it is not required for every embodiment of the invention.

[0220] In some embodiments, the invention provides methods and systems of selecting polynucleotides to encode polypeptides of the invention, comprising selecting polynucleotide segments lacking (or containing) certain restriction sites individually and/or after combinatorial concatenation with other segments (e.g., see Example 9.3.7).

[0221] The exemplary libraries provided herein are not limiting and provided for exemplification only.

### EXAMPLES

[0222] This invention is further illustrated by the following examples which should not be construed as limiting. The contents of all references, patents and published patent applications cited throughout this application are hereby incorporated by reference.

[0223] In general, the practice of the present invention employs, unless otherwise indicated, conventional techniques of chemistry, molecular biology, recombinant DNA technology, PCR technology, immunology (especially, e.g., antibody technology), expression systems (e.g., yeast expression, cell-free expression, phage display, ribosome display, and PROFUSION™), and any necessary cell culture that are within the skill of the art and are explained in the literature. See, e.g., Sambrook, Fritsch and Maniatis, Molecular Cloning Cold Spring Harbor Laboratory Press (1989); DNA Cloning, Vols. 1 and 2, (D. N. Glover, Ed. 1985); Oligonucleotide Synthesis (M. J. Gait, Ed. 1984); PCR Handbook Current Protocols in Nucleic Acid Chemistry, Beaucage, Ed. John Wiley & Sons (1999) (Editor); Oxford Handbook of Nucleic Acid Structure, Neidle, Ed., Oxford Univ Press (1999); PCR Protocols: A Guide to Methods and Applications, Innis et al., Academic Press (1990); PCR Essential Techniques: Essential Techniques, Burke, Ed., John Wiley & Son Ltd (1996); The PCR Technique: RT-PCR, Siebert, Ed., Eaton Pub. Co. (1998); Antibody Engineering Protocols (Methods in Molecular Biology), 510, Paul, S., Humana Pr (1996); Antibody Engineering: A Practical Approach (Practical Approach Series, 169), McCafferty, Ed., Irl Pr (1996); Antibodies: A Laboratory Manual, Harlow et al., C.S.H.L. Press, Pub. (1999); Current Protocols in Molecular Biology, eds. Ausubel et al., John Wiley & Sons (1992); Large-Scale Mammalian Cell Culture Technology, Lubiniecki, A., Ed., Marcel Dekker, Pub., (1990); Phage Display: A Laboratory Manual, C. Barbas (Ed.), CSHL Press, (2001); Antibody Phage Display, P O'Brien (Ed.), Humana Press (2001); Border et al., Nature Biotechnology, 1997, 15: 553; Border et al., Methods Enzymol., 2000, 328: 430; ribosome display as described by Pluckthun et al. in U.S. Pat. No. 6,348,315, and Profusion™ as described by Szostak et al. in U.S. Pat. Nos. 6,258,558; 6,261,804; and 6,214,553; and bacterial periplasmic expression as described in US20040058403A1. Each of the references cited in this paragraph is incorporated by reference in its entirety.

[0224] Further details regarding antibody sequence analysis using Kabat conventions and programs to analyze aligned nucleotide and amino acid sequences may be found, e.g., in Johnson et al., Methods Mol. Biol., 2004, 248: 11; Johnson et al., Int. Immunol., 1998, 10: 1801; Johnson et al., Methods Mol. Biol., 1995, 51: 1; Wu et al., Proteins, 1993, 16: 1; and Martin, Proteins, 1996, 25: 130. Each of the references cited in this paragraph is incorporated by reference in its entirety.

[0225] Further details regarding antibody sequence analysis using Chothia conventions may be found, e.g., in Chothia et al., J. Mol. Biol., 1998, 278: 457; Morea et al., Biophys. Chem., 1997, 68: 9; Morea et al., J. Mol. Biol., 1998, 275: 269; Al-Lazikani et al., J. Mol. Biol., 1997, 273: 927. Bane et al., Nat. Struct. Biol., 1994, 1: 915; Chothia et al., J. Mol. Biol., 1992, 227: 799; Chothia et al., Nature, 1989, 342: 877; and Chothia et al., J. Mol. Biol., 1987, 196: 901. Further analysis of CDRH3 conformation may be found in Shirai et al., FEBS Lett., 1999, 455: 188 and Shirai et al., FEBS Lett., 1996, 399: 1. Further details regarding Chothia analysis are described, for example, in Chothia et al., Cold Spring Harb. Symp. Quant Biol., 1987, 52: 399. Each of the references cited in this paragraph is incorporated by reference in its entirety.

[0226] Further details regarding CDR contact considerations are described, for example, in MacCallum et al., J. Mol. Biol., 1996, 262: 732, incorporated by reference in its entirety.

[0227] Further details regarding the antibody sequences and databases referred to herein are found, e.g., in Tomlinson et al., J. Mol. Biol., 1992, 227: 776, VBASE2 (Retter et al., Nucleic Acids Res., 2005, 33: D671); BLAST (www.ncbi.nlm.nih.gov/BLAST/); CDHIT (bioinformatics.ljcrf.edu/cd-hi/); EMBOSS (www.hgmp.mrc.ac.uk/Software/EMBOSS/); PHYLIP (evolution.genetics.washington.edu/phylip.html); and FASTA (fasta.bioch.virginia.edu). Each of the references cited in this paragraph is incorporated by reference in its entirety.

### Light Chain Libraries

### Example 1

### Light Chain Libraries with Framework and/or CDRL1 and/or CDRL2 Variability

[0228] Although the diversity in antibody sequences is concentrated in the CDRs, certain residues in the framework regions can also influence antigen recognition and/or modulate affinity (Queen et al., Proc. Natl. Acad. Sci. USA, 1989, 86: 10029; Carter et al., Proc. Natl. Acad. Sci. USA, 1992, 89: 4285, each incorporated by reference in its entirety). These residues have been cataloged and used to make framework substitutions that improve antibody affinity, for example, during the process of antibody humanization (e.g., see the “Vernier” residues in Foote and Winter, J. Mol. Biol., 1992, 224: 487, incorporated by reference in its entirety). In the heavy chain, the Vernier residues include Kabat-numbered residues 2, 27-30, 47-49, 67, 69, 71, 73, 78, 93-94, and 103. In the light chain, the Vernier residues include Kabat residues 2, 4, 35-36, 46-49, 64, 66, 68-69, 71, and 98. The Vernier residue numbers are the same for kappa and lambda light chain sequences (see Table 4 in Chothia et al., J. Mol. Biol., 1985, 186: 651, which is incorporated by reference in its entirety). Additionally, framework positions at the VL-VH interface may also influence affinity. In the heavy chain, the interface residues include Kabat residues 35, 37, 39, 45, 47, 91, 93, 95, 100, and 103 (Chothia et al., J. Mol. Biol., 1985, 186: 651, incorporated by reference in its entirety). In the light chain, the interface residues include Kabat residues 34, 36, 38 44, 46, 87, 89, 91, 96, and 98.

[0229] The following procedure was used to select the framework residues to be varied and the amino acids to which they should be varied:
[0230] a. A collection of human VK light chain DNA sequences was obtained from NCBI (see Appendix A of WO/2009/036379 for GI Nos.). These sequences were classified according to the germline origin of their VK germline segment.
[0231] b. Patterns of variation at each of the Vernier and interface positions were examined as follows:
   [0232] i. Equation 1 (from Makowski & Soares, Bioinformatics, 2003, 19: 483, incorporated by reference in its entirety) was used to calculate a diversity index for the Vernier positions, interface positions, CDRL1, and CDRL2.

$$d = \frac{1}{N \sum {p}_{i }^{2}} \qquad Equation 1$$

[0233] Here, d is the diversity index, N is 20, the total number of amino acid types, and pᵢ is the fraction of amino acid of type “i” at the position of interest. The sum is carried out over the 20 amino acid types. The parameter d will attain its minimum value of 0.05 or 1/20, when a single amino acid type is observed at a given position: pᵢ is 1 for one type and zero for all the rest. Conversely, when all the amino acid types are equally probable (e.g., pᵢ is 0.05 for all i), d will attain its maximum value of 1.0.
[0234] ii. The diversity index for each of the Vernier and interface positions were compared to the diversity index for the positions in CDRL1 and CDRL2.
[0235] iii. The interface positions were found to be relatively invariant, with d values very close to the minimum of 0.05, and were thus not altered. The Vernier residues with a diversity index comparable to or larger than that of the CDR positions (i.e., at or above 0.07 for the particular example provided in FIG. 1) were selected as candidates for variance (see FIG. 1). The amino acid residues included in these positions were selected from amongst the two to three amino acids most frequently occurring in that position in the sequences in the collection of human VK light chains, for each particular VK germline.
[0236] iv. Table 2 shows the positions selected for variance in each of nine exemplified light chain germlines. The alternative framework positions represent positions with a diversity index less than the primary framework positions, but where variability may still be incorporated to influence antigen binding.
[0237] v. The amino acid residues in the framework positions selected for variance were varied as follows (Table 3 provides the polypeptide sequences of these variants):
   [0238] 1. Position 2: Germline I was optionally changed to V.
   [0239] 2. Position 4: Germline M or L was optionally changed to L or M. In some embodiments, changes from M to L, but not the reverse, may be preferred, because M may undergo oxidation during production, processing, or storage, potentially altering the properties of the antibody.
   [0240] 3. Position 36: Germline Y was optionally changed to F and H.
   [0241] 4. Position 46: Germline L was optionally changed to V.
   [0242] 5. Position 48: Germline I was optionally changed to L.
   [0243] 6. Position 49: Germline Y was optionally changed to S, F, and H.
   [0244] 7. Position 66: Germline G was optionally changed to R and E.

[0245] One of ordinary skill in the art would readily recognize that the procedure outlined above could also be used to select positions to vary in Vλ germline sequences, and that libraries containing Vλ chains also fall within the scope of the invention.

[0246] In addition to the framework mutations, variability was also introduced into CDRL1 and CDRL2. This was performed by determining which residues in CDRL1 and CDRL2 were variable, within a particular germline, in the VK dataset used above and incorporating the most frequently occurring 2 to 4 variants into CDRL1 and CDRL2 in the synthetic libraries of the invention. With the exception of position 50 of CDRL2 of the VK1-5 germline, these alternatives did not arise from allelic variation. Table 3 shows the polypeptide sequences of nine light chain chassis and their framework and CDR L1/L2 variants for the currently exemplified embodiment of the invention. The amino acid residues in the CDRL1/L2 positions selected for variance were varied as follows (using the Chothia-Lesk numbering system; Chothia and Lesk, J. Mol. Biol., 1987, 196: 901):
[0247] 1. Position 28: Germline S or G were optionally changed to G, A, or D.
[0248] 2. Position 29: Germline V was optionally changed to I.
[0249] 3. Position 30: Germline S was optionally changed to N, D, G, T, A, or R.
[0250] 4. Position 30A: Germline H was optionally changed to Y
[0251] 5. Position 30B: Germline S was optionally changed to R or T.
[0252] 6. Position 30E: Germline Y was optionally changed to N.
[0253] 7. Position 31: Germline S was optionally changed to D, R, I, N, or T.
[0254] 8. Position 32: Germline Y or N were optionally changed to F, S, or D.
[0255] 9. Position 50: Germline A, D, or G were optionally changed to G, S, E, K, or D.
[0256] 10. Position 51: Germline G or A were optionally changed to A, S, or T.
[0257] 11. Position 53: Germline S or N were optionally changed to N, H, S, K, or R.
[0258] 12. Position 55: Germline E was optionally changed to A or Q.

### Example 2

### Light Chain Libraries with Enhanced Diversity in CDRL3

[0259] A variety of methods of producing light chain libraries are known in the art (e.g., see U.S. Publication Nos. 2009/0181855, 2010/0056386, and WO/2009/036379). An analysis of clinically validated antibody sequences indicated that these sequences have very little deviation from germline-like VL-JL (where “L” can be a kappa or lambda germline sequence) rearrangements prior to somatic mutation (FIG. 2). Here, a germline-like rearrangement is one where neither the V nor J portion differ from the respective germline genes and, for the purposes of this particular example, where the length of CDRL3 is restricted to 8, 9 or 10 amino acids (see U.S. Publication Nos. 2009/0181855, 2010/0056386, and WO/2009/036379). For the IGHJK1 gene, however, both WT (Trp-Thr) and RT (Arg-Thr) sequences (the first two N-terminal residues) are considered “germline-like” and so are full L3 rearrangements containing such sequences. Therefore, new light chain libraries were designed and constructed with the objectives of simultaneously (1) minimizing deviation from germline-like sequences, as defined above; and (2) generating maximal diversity. In particular, the overarching goal was to maximize the type of diversity that is indicated to be most favorable by clinically validated antibody sequences. In particular, the designed library sought to maximize the diversity of CDRL3 sequences that differ from length-matched germline sequences by two amino acids or fewer.

[0260] This was accomplished by utilizing a “jumping dimer” or “jumping trimer” approach to light chain oligonucleotide design. The jumping dimer approach involves the incorporation of degenerate codons at each of the six positions of CDRL3 encoded by the VL segment (L3-VL). At most two positions vary from germline in each individual L3-VL sequence, but the two positions do not have to be adjacent to one another. Thus, the total number of designed degenerate oligonucleotides synthesized per VL chassis is 6!/(4!2!), or fifteen (accounting for six of the most commonly occurring amino acids at the junction (position 96) between VL and JL for each kappa germline chassis (namely F, L, I, R, W, Y, and P; see U.S. Publication Nos. 2009/0181855 and 2010/0056386, and WO/2009/036379, each of which is incorporated by reference in its entirety, for more details on the junctional amino acids at position 96). The jumping trimer approach is analogous to the jumping dimer approach, but with three positions varying from germline in each individual L3-VL sequence, instead of two as in the jumping dimer. The degenerate codons selected for each position in the jumping dimer and trimer approaches were chosen to (1) to reproduce the diversity contained in the known repertoire of publicly available human VK sequences (see Appendix A of WO/2009/036379); and (2) to minimize or eliminate undesirable sequences within the CDRL3s of the resulting synthetic light chains, such as N-linked glycosylation motifs (NXS/NXT), Cys residues, stop codons, and deamidation-prone NG motifs. Table 4 shows the fifteen degenerate oligonucleotides encoding the VK1-39 CDRL3 sequences with a length of nine amino acids and F or Y as the junctional amino acid, and the corresponding degenerate polypeptide sequences. Table 5, Table 6, and Table 7 provide the oligonucleotide sequences for each of the VK sequences of the exemplary jumping dimer and trimer libraries, for CDRL3 lengths of 8, 9, and 10, respectively, and the sequences for the corresponding CDRL3s.

[0261] The number of unique CDRL3 sequences within each germline library was then enumerated and compared to the number of unique CDRL3 sequences in a different light chain library, designated “VK-v1.0” (see Example 6.2 in US Publication No. 2009/0181855), for each of the three lengths. Table 8 provides the number of unique CDRL3 sequences in each of the respective germline libraries.

[0262] FIG. 3 provides the percentage of sequences in the jumping dimer and VK-v1.0 libraries with CDRL3 length of nine amino acids that contain no mutations from germline-like sequences (Table 1) or 1, 2, 3, or 4 or fewer mutations from germline-like sequences. Naturally-occurring VK1-05 sequences are almost as likely to have Ser (germline amino acid type) as Pro at Kabat position 95, thus both residues (S and P) were incorporated in the synthetic libraries representing VK1-05 repertoires. However, as indicated in Table 1, only Ser was considered to be a germline-like residue at position 95 for the purposes of this analysis when the VK gene is VK1-05. The plot for VK3-20 is representative of the remaining chassis in the library for a length nine. All of the sequences in the VK1-05 library were within three amino acids of human germline sequences, and approximately 63% of the sequences were within two amino acids of human germline-like sequences. For the rest of the libraries, and as designed, 100% of the sequences were within two amino acids of human germline-like sequences; thus, over 95% of the sequences of length 9 in the jumping dimer library considered as a whole were within 2 amino acids of germline-like sequences. By comparison, only 16% of the members of the VK-v1.0 libraries of length nine amino acids are within two amino acids of the corresponding human germline-like sequences. For length 8, about 98% of the sequences in the jumping dimer libraries were within two amino acids of germline-like, versus about 19% for VK-v1.0. For length 10, more than 95% of the sequences of the jumping dimer library were within two amino acids of germline-like, versus about 8% for VK-v1.0.

[0263] In some embodiments, to concentrate the diversity in positions most likely to be solvent-exposed in the folded antibody, positions 89 and 90 (Kabat numbering) are not modified from germline—these are most often QQ, but the sequence is MQ for the VK2-28 chassis. Other VK germline genes have different sequences at positions 88-89, and the use of these genes as chassis also falls within the scope of the invention. For example, VK1-27 has QK, VK1-17 and VK1-6 both have LQ, and so on. The sequences in these positions are known in the art and can be obtained, for example, from Scaviner et al., Exp. Clin. Immunogenet., 1999, 16: 234 (see FIG. 2), which is incorporated by reference in its entirety.

### CDRH3 Libraries

[0264] The following examples describe methods and compositions useful for the design and synthesis of antibody libraries with improved CDRH3 sequences in comparison to libraries known in the art. The CDRH3 sequences of the invention have enhanced diversity in comparison to libraries known in the art, while retaining the character of human sequences, improving combinatorial efficiency of the synthetic CDRH3 segments, and/or improving the matching between synthetic CDRH3 sequences and human CDRH3 sequences in one or more reference sets.

### Example 3

### Generating a Curated Reference Set of Human Preimmune CDRH3 Sequences

[0265] A file containing approximately 84,000 human and mouse heavy chain DNA sequences was downloaded from the BLAST public resource (ftp.ncbi.nih.gov/blast/db/FASTA/; filename: igSeqNt.gz; download date: Aug. 29, 2008). Of these approximately 84,000 sequences, approximately 34,000 sequences were identified as human heavy chain sequences based on analysis of the sequence header annotation. These sequences were then filtered as follows: First, all sequences were classified, via their VH-region, according to their corresponding (closest matched) VH germline. Sequences that were of an incorrect or insufficient length, or that could not be matched due to extensive mutation, were discarded. Second, any sequences containing more than five mutations, at the DNA level, when compared to their corresponding germline VH sequence were also discarded. It was assumed, consistent with Rada and Milstein, EMBO J., 2001, 20: 4570, that mutations (or lack thereof) in the N-terminal portion of the variable region may be used as conservative surrogates for mutations (or lack thereof) in the C-terminal portion of the variable region, in particular in CDRH3. Therefore, selecting only sequences with five or fewer nucleotide mutations in VH, which is N-terminal to CDRH3 is highly likely to also select for CDRH3 sequences that are either lightly mutated or not mutated at all (i.e., having preimmune character).

[0266] After translating the remaining DNA sequences into their amino acid counterparts, the appropriate reading frame containing the heavy chain germline amino acid sequence was identified and used to identify the sequences of the CDRs, including that of the CDRH3. The list of CDRH3 sequences obtained at this point was further filtered to eliminate members that did not differ from any other sequence in the set by at least three amino acids (after matching for length). This process yielded 11,411 CDRH3 sequences, with 3,571 sequences annotated as originating from healthy adults (“Healthy Preimmune Set” or “HPS”; see Appendix A for GI Nos.) and the other 7,840 sequences annotated as originating from individuals suffering from disease, of fetal origin, or of antigen-specific origin. The methods described below were then used to deconvolute each of the sequences in the HPS into the four segments that constitute the CDRH3: (1) TN1, (2) DH, (3) N2, and (4) H3-JH.

### Example 4

### Method to Match Segments from a Theoretical Segment Pool to CDRH3s in a Reference Set

[0267] This example describes the method used to identify the TN1, DH, N2, and H3-JH segments of the CDRH3s in the HPS. The currently exemplified approach to the design and synthesis of human CDRH3 sequences mimics the segmental V-D-J gene recombination processes by which the human immune system generates the preimmune CDRH3 repertoire. The matching method described here determines which TN1, DH, N2 and H3-JH segments have been used to produce a particular CDRH3 across a reference set of CDRH3s (e.g., the HPS). This information is then used, optionally in conjunction with other information described below (e.g., physicochemical properties), to determine which TN1, DH, N2, and H3-JH segments from a theoretical segment pool (or segments extracted from the CDRH3 sequences in the reference set, in the case of the TN1 and N2) should be included in a synthetic CDRH3 library.

[0268] The inputs to the matching method are: (1) a reference set of CDRH3 sequences (e.g., the human CDRH3 sequences in the HPS), and (2) a theoretical segment pool, containing a plurality of TN1, DH, N2 and/or H3-JH segments. Methods by which the members of the theoretical segment pool are generated are more fully described below. For each CDRH3 in the reference set, the matching method generates two outputs: (i) a list of the closest matched CDRH3 sequences that can be generated using the segments of the theoretical segment pool, and (ii) the one or more segment combinations from the theoretical segment pool that can be used to create these closest matched CDRH3 sequences.

[0269] The matching method was performed as follows: Each TN1 segment in the theoretical segment pool was aligned at its first amino acid with the first amino acid (position 95) of the CDRH3 sequence from the reference set. For each segment length, all (i.e., one or more) of the segments returning the best matches are retained, and the remaining segments are discarded. The retained TN1 segments are then concatenated with all DH segments from the theoretical segment pool, to create [TN1]-[DH] segments. These segments are then aligned as above, and all the best matches for each of the [TN1]-[DH] segments are retained. The procedure is repeated with [TN1]-[DH]-[N2] and [TN1]-[DH]-[N2]-[H3-JH] segments until the length of the CDRH3 sequence from the reference set is identically recapitulated by the segment combinations from the theoretical segment pool. All segment combinations returning the best match to the CDRH3s in the reference set are retained as the output of the matching method.

[0270] Table 9 provides an example of the output of the matching method, specifically the output for four individual sequences from the HPS, using a theoretical segment pool designated “Theoretical Segment Pool 1,” or “TSP1”. TSP1 contains several theoretical segment pools, namely: 212 TN1 segments (Table 10), 1,111 DH segments (Table 11), 141 N2 segments (Table 12), and 285 H3-JH segments (Table 13). The CDRH3 sequence in Test Case 1 contains an identical match in TSP1 that is reached via a unique combination of the four segments. Test Cases 2.1 and 2.2 each return an identical match, but via two distinct combinations that differ in the TN1 and DH segments. In Test Cases 3.1, 4.1, and 4.2, the closest matches are all a single amino acid away from the reference CDRH3, and can be reached via one (3.1) or two (4.1 and 4.2) combinations of segments from TSP1. This approach can be generalized to find all of the closest matches to any reference CDRH3 sequence within any theoretical segment pool and all combinations of the segments within the theoretical segment pool that can produce the reference CDRH3 sequence exactly and/or its closest matches.

### Example 5

### Deriving Theoretical Segment Pools of H3-JH Segments

[0271] In order to produce theoretical segment pools of H3-JH segments for consideration for inclusion in a synthetic CDRH3 library, the following method was applied to generate mutants of seven (IGHJ1-01, IGHJ2-01, IGHJ3-02, IGHJ4-02, IGHJ5-02, IGHJ6-02 and IGHJ6-03) of the twelve germline IGHJ sequences of Table 14. These seven alleles were chosen because they were among the most commonly occurring alleles in human sequences. Libraries where all sequences of Table 14 (some differing only in FRM4) are used to generate H3-JH and/or JH (i.e., H3-JH and FRM4) also fall within the scope of the invention. The method is intended to simulate the creation of junctional diversity during the V-D-J recombination process in vivo, which occurs via enzyme-mediated addition and deletion of nucleotides to the germline gene segments. The method proceeds as follows, and results in a fully enumerated theoretical segment pool of H3-JH segments:
[0272] 1. A pre-treatment was applied to the IGHJ genes that contain a partial codon consisting of two nucleotide bases at their 5′ terminus (IGHJ3-02, IGHJ4-02, IGHJ5-02, IGHJ6-02 and IGHJ6-03), prior to the first nucleotide encoding the translation of the JH segment that produces the well-known JH framework regions. For example, the IGHJ3-02 gene contains an AT dinucleotide sequence prior to the first nucleotide encoding the translation of the JH segment that produces the JH framework region (FIG. 4, top). All partial codons consisting of two nucleotide bases were completed, using all possible nucleotide doublets (i.e., NN) at their two most 5′ positions (FIG. 4, top, second row for IGHJ3-02). More specifically, the most 5′ nucleotide in the germline sequence was mutated to N and an additional N was added 5′ to that nucleotide.
[0273] 2. IGHJ genes IGHJ1-01 (FIG. 4, center) and IGHJ2-01 (FIG. 4, bottom) contain zero and one nucleotide base(s) at their 5′ termini, prior to the first nucleotide encoding the translation of the JH segment that produces the JH framework region. For these genes, the pre-treatment described in step 1 was not performed. Instead, the 5′ doublets were mutated to NN (FIG. 4, middle and bottom, second row of each). Therefore, after performing this step, each of the seven IGHJ genes enumerated above was converted to a variant with an NN doublet as its first two 5′ positions.
[0274] 3. The 5′ codons of the sequences produced via steps 1 and 2 were then deleted, and the first two bases of the resulting DNA sequence were subsequently mutated to an NN doublet (FIG. 4, rows 3-4 for all).
[0275] 4. The 5′ codons of the sequences produced in step 3 were then deleted, and the first two bases of the resulting DNA sequence were subsequently mutated to an NN doublet (FIG. 4, rows 5-6 for all).
[0276] 5. Each of the polynucleotide sequences generated by steps (1)-(4) were then translated, to obtain a theoretical segment pool consisting of 248 parent H3-JH polypeptide segments (Table 15) from the reading frame for each sequence that produced the JH framework region.
[0277] 6. The parent H3-JH polypeptide segments were truncated at their N-termini, by removing one amino acid at a time until only the portion of the JH segment comprising FW4 remains (i.e., an H3-JH segment with a length of zero amino acids).

[0278] The methods described above resulted in the production of a theoretical segment pool of 285 H3-JH segments (Table 13).

### Example 6

### Deriving Theoretical Segment Pools of DH Segments

[0279] Two theoretical pools of DH segments were generated, using one or more of two translation methods, designated “Translation Method 0” (TM0), or “Translation Method 1” (“TM1”), each performed in the three forward reading frames of 27 human germline IGHD DNA sequences or segments derived therefrom (Table 16).

### The 1K DH Theoretical Segment Pool (1K DH)

[0280] TM1 was used to generate the “1K DH Theoretical Segment Pool” (“1K DH”; see the 1,111 DH segments of Table 11). In TM1, IGHD sequences that had a partial codon containing two untranslated bases after translation in any of the three forward reading frames were completed to produce a full codon only if the two bases could encode only a single amino acid upon completion. For example, a DNA sequence such as TTA-GCT-CG has two full codons that would be translated to LA, and a remaining partial codon (CG) that can only encode R, as any of CGA, CGC, CGG, or CGT will encode R. Thus, applying TM1 to this sequence will yield LAR. For sequences with partial codons that could encode more than one amino acid (e.g., GA or AG), the partial codons were ignored. Applying TM1 to the 27 IGHD sequences of Table 16 generated a theoretical segment pool containing the 73 DH parent segments of Table 17 (some containing stop codons (“Z”) and unpaired Cys residues). These sequences were then progressively deleted at the amino acid level, at their N- and C-termini, until only two amino acids remained. Truncated segments were discarded if they contained a stop codon, unpaired Cys residues, N-linked glycosylation motifs, or deamidation motifs. This process yielded the 1,111 DH segments of Table 11.

### The 68K DH Theoretical Segment Pool (68K DH)

[0281] The 27 IGHD genes and alleles of Table 16 were progressively deleted on either or both of their 5′ and 3′ ends until four bases remained, yielding 5,076 unique polynucleotide sequences of four or more nucleotides. These 5,076 sequences were subjected to systematic addition of 0, 1 and/or 2 N nucleotides their 5′ and/or 3′ ends. The resulting sequences were translated using TM0. In TM0, only full codons are translated; partial codons (i.e., 1 or 2 bases) are ignored. This method yielded 68,374 unique DH polypeptide segments after elimination of segments with stop codons, unpaired Cys residues, Asn in the last or next to last position that can lead to N-linked glycosylation motifs, and deamidation motifs (the “68K DH Theoretical Segment Pool”). Using the IGHD genes of Table 16 as an input for the PYTHON computer code provided below will reproduce the exact theoretical segment pool of 68,374 DH segments. There are two free parameters in this program: (1) the minimum length of the DNA sequences remaining after progressive deletions (4 bases in this example), and (2) the minimum length of the peptide sequences (2 amino acids in this example) acceptable for inclusion in the theoretical segment pool. These parameters can be changed to alter the output of the program. For example, changing the first parameter to one base and the second parameter to one amino acid would lead to a larger theoretical segment pool with 68,396 unique sequences, including 18 single-amino acid segments. DH segments progressively truncated to different lengths also fall within the scope of the invention; for example those truncated to 1, 2, 3, or 4 or more amino acids, or 1, 2, 3, 4, 5, 6, 7, 8, 9, 10, or more nucleotides prior to translation.

PYTHON Computer Program to Generate 68,374 DH Segments

```
import math, sys, string
class genes:
    name = ′x′
    seq = ′x′
    progdel = set( )
class table:
  name = ′x′
  dna = ′x′
  dna_n = 20 * [′x′]
  prot = 60 * [′x′]
  uprot = set( )
pepcod = {′A′:0, ′C′:1, ′D′:2, ′E′:3, ′F′:4, ′G′:5, ′H′:6,
′I′:7, ′K′:8, ′L′:9, ′M′:10,
′N′:11, ′P′:12, ′Q′:13, ′R′:14, ′S′:15, ′T′:16, ′V′:17, ′W′:18,
′Y′:19, ′Z′:20}
codpep = 21 * [″]
codpep[0] = ′A′
codpep[1] = ′C′
codpep[2] = ′D′
codpep[3] = ′E′
codpep[4] = ′F′
codpep[5] = ′G′
codpep[6] = ′H′
codpep[7] = ′I′
codpep[8] = ′K′
codpep[9] = ′L′
codpep[10] = ′M′
codpep[11] = ′N′
codpep[12] = ′P′
codpep[13] = ′Q′
codpep[14] = ′R′
codpep[15] = ′S′
codpep[16] = ′T′
codpep[17] = ′V′
codpep[18] = ′W′
codpep[19] = ′Y′
# Z represents a stop codon
codpep[20] = ′Z′
bases = ′ACGT′
def translate_dna(sequence):
# Translation of input DNA sequence using standard genetic code
# Only full codons are considered with any remaining 1 or 2 bp
being ignored
# Z represents a stop codon
    code = {
    ′ATA′:′I′, ′ATC′:′I′, ′ATT′:′I′, ′ATG′:′M′,
    ′ACA′:′T′, ′ACC′:′T′, ′ACG′:′T′, ′ACT′:′T′,
    ′AAC′:′N′, ′AAT′:′N′, ′AAA′:′K′, ′AAG′:′K′,
    ′AGC′:′S′, ′AGT′:′S′, ′AGA′:′R′, ′AGG′:′R′,
    ′CTA′:′L′, ′CTC′:′L′, ′CTG′:′L′, ′CTT′:′L′,
    ′CCA′:′P′, ′CCC′:′P′, ′CCG′:′P′, ′CCT′:′P′,
    ′CAC′:′H′, ′CAT′:′H′, ′CAA′:′Q′, ′CAG′:′Q′,
    ′CGA′:′R′, ′CGC′:′R′, ′CGG′:′R′, ′CGT′:′R′,
    ′GTA′:′V′, ′GTC′:′V′, ′GTG′:′V′, ′GTT′:′V′,
    ′GCA′:′A′, ′GCC′:′A′, ′GCG′:′A′, ′GCT′:′A′,
    ′GAC′:′D′, ′GAT′:′D′, ′GAA′:′E′, ′GAG′:′E′,
    ′GGA′:′G′, ′GGC′:′G′, ′GGG′:′G′, ′GGT′:′G′,
    ′TCA′:′S′, ′TCC′:′S′, ′TCG′:′S′, ′TCT′:′S′,
    ′TTC′:′F′, ′TTT′:′F′, ′TTA′:′L′, ′TTG′:′L′,
    ′TAC′:′Y′, ′TAT′:′Y′, ′TAA′:′Z′, ′TAG′:′Z′,
    ′TGC′:′C′, ′TGT′:′C′, ′TGA′:′Z′, ′TGG′:′W′,
    }
    proteinseq ″
    for n in range(0, len(sequence), 3):
      if code.has_key(sequence[n:n+3]) == True:
        proteinseq += code[sequence[n:n+3]]
    return proteinseq
# main body starts here
# open input and output files
in1 = open(sys.argv[1], ′r′)
ou1 = open(sys.argv[2], ′w′)
# read DNA sequences for input DH segments
data = in1.readlines( )
nseg = len(data)
seqs = [ genes( ) for i in range(nseg) ]
for i in range(nseg):
  line = data[i]
  words = string.split(line)
  seqs[i].name = words[0]
  seqs[i].seq = words[1]
  seqs[i].progdel = set( )
# Define here minimum length for DNA (4) and for protein (2)
minlen = 4
minp = 2
# Implement progressive base by base deletion from 5' or 3' or
both ends
alln = 0
for i in range(nseg):
    seq = seqs[i].seq
    lseq = len(seq)
    nt = ct = lseq
    for n in range(nt):
      for c in range(ct):
        nseq = seq[n:lseq−c]
        if (len(nseq) >= minlen):
          seqs[i].progdel.add(nseq)
    alln += len(seqs[i].progdel)
# Collect unique DNA sequences across all DH genes of origin and
ignore redundant ones
progdel = [ table( ) for i in range(alln) ]
n = 0
for i in range(nseg):
    for kk in seqs[i].progdel:
      unix = 1
      for j in range(n):
        if (kk == progdel[j].dna):
          unix = 0
          break
      if (unix == 1):
        progdel[n].name = seqs[i].name
        progdel[n].dna = kk
        n +=1
# Add none, 1 or 2 bp on one or both ends
# extras 20 + 20 * (21) = 20 + 420 = 440
# allocate memory for all variants
for i in range(n):
      progdel[i].dna_n = 440 * [′x′]
      progdel[i].prot = 441 *3 * [′x′]
      progdel[i].uprot = set( )
# add 1 or 2 bases at each end of input segment
tot = 0
for i in range(n):
# Step over each unique DNA sequence
  k = 0
# One base on 5' end combined with 1 or 2 bases added to 3' end
  for 15 in range(4):
    progdel[i].dna_n[k] = bases[15] + progdel[i].dna
    k +=1
    for 13 in range(4):
      progdel[i].dna_n[k] = bases[15] + progdel[i].dna + bases[13]
      k +=1
    for 13 in range(4):
      for m3 in range(4):
        progdel[i].dna_n[k] = bases[15] + progdel[i].dna +
    bases[13] + bases[m3]
        k +=1
# One or two bases added to 3' only in this part
  for 13 in range(4):
    progdel[i].dna_n[k] = progdel[i].dna + bases[13]
    k +=1
  for 13 in range(4):
    for m3 in range(4):
      progdel[i].dna_n[k] = progdel[i].dna + bases[13] +
      bases[m3]
      k +=1
# Two bases on 5' end combined with 1 or 2 bp on 3' end
  for 15 in range(4):
    for m5 in range(4):
      progdel[i].dna_n[k] = bases[15] + bases[m5] +
      progdel[i].dna
      k +=1
      for 13 in range(4):
        progdel[i].dna_n[k] = bases[15] + bases[m5] +
progdel[i].dna + bases[13]
        k +=1
      for 13 in range(4):
        for m3 in range(4):
        progdel[i].dna_n[k] = bases[15] + bases[m5] +
progdel[i].dna + bases[13] + bases[m3]
        k +=1
# Now translate in all 3 forwared reading frames
# Save unique peptide sequences
  for fr in range(3):
    piece = progdel[i].dna
    piece = piece[fr:]
    tpiece = translate_dna(piece)
    progdel[i].prot[fr] = tpiece
    progdel[i].uprot.add(tpiece)
  for k in range(440):
    piece = progdel[i].dna_n[k]
    piece = piece[fr:]
    tpiece = translate_dna(piece)
    progdel[i].uprot.add(tpiece)
    progdel[i].prot[3+440*fr +k] = tpiece
  tot += len(progdel[i].uprot)
# Collect unique sequences with no ASN at last or next to last
position, no unpaired or consecutive CYS, no stops
unset = set( )
segm = [ genes( ) for i in range(tot) ]
lux = 0
nn = 0
for i in range(n):
    k = 0
    for kk in progdel[i].uprot:
# Filter out sequences with undesired features, including length
being too short (under “minp” defined above)
        if (len(kk) < minp): continue
        if (kk[len(kk)−1] == “N” or kk[len(kk)−2] == “N”):
continue
        if (kk.count(“Z”) > 0 or kk.count(“CC”) >0 or
kk.count(“C”) % 2 >0): continue
        unset.add(kk)
        lux1 = len(unset)
        if (lux1 > lux):
          segm[nn].name = progdel[i].name + “_” +
str(nn)
          segm[nn].seq = kk
          nn += 1
        lux = lux1
        k +=1
# Print out unique peptide sequences that pass all the filters
for i in range(nn):
ou1.write(″%s\t%s\n″ % (segm[i].name, segm[i].seq))
```

### Example 7

### Deriving Theoretical Segment Pools of TN1 and N2 Segments

[0282] The libraries of this example are designed to, in some instances, have a greater diversity in their TN1 and N2 segments in comparison to other libraries known in the art. The diversity of the TN1 and N2 segments was increased by using the matching method described in Example 4 to deconvolute the CDRH3 sequences in the HPS into their constituent segments (i.e., TN1, DH, N2, and H3-JH), followed by extraction of “novel” TN1 and N2 segments in the manner described below. For the purposes of the invention, “novel” TN1 and N2 segments are TN1 and N2 segments that do not appear in a theoretical segment pool that is matched to a reference set of CDRH3 sequences. Following is an example of the method used to extract novel TN1 and N2 segments from the HPS. This method can be generalized to extract novel TN1 and N2 segments from any reference set of CDRH3 sequences, using any theoretical segment pool containing TN1, DH, N2, and/or H3-JH segments.

[0283] Table 9 provides the matching results for the reference CDRH3 sequence ERTINWGWGVYAFDI (Test Cases 5.1-5.4) from the HPS, using Theoretical Segment Pool 1 (“TSP1”). The best matches to the reference CDRH3 are four CDRH3 sequences, each within three amino acids of the reference CDRH3 sequence. In each of these matches, the TN1, DH, N2 and H3-JH segments are of length 4, 3, 3 and 5 amino acids, respectively. Thus the reference CDRH3 can be deconvoluted into the following segments: ERTI-NWG-WGW-YAFDI (i.e. [TN1]-[DH]-[N2]-[H3-JH], respectively). The DH and H3-JH segments from the reference CDRH3, NWG and YAFDI respectively, are identically present in TSP1. However, the TN1 (ERTI) and N2 (WGW) segments from the reference CDRH3 are absent in TSP1 and match TSP1 segments with one or more amino acid mismatches. These “novel” TN1 and N2 segments are extracted from the reference CDRH3 and considered for inclusion prospective theoretical segment pools and/or synthetic libraries. Additional novel TN1 and N2 segments were accumulated by applying this analysis to all members of the HPS. In order to robustly identify TN1 and N2 sequences, the extraction was performed only for those CDRH3 sequences in which the DH and H3-JH segments in the reference CDRH3 and TSP1 cumulatively return no more than 3 amino acid mismatches, implying that the DH and

[0284] H3-JH segments of the reference CDRH3 had been reliably assigned.

### Example 8

### Calculation of Segment Usage Weights

[0285] Segment usage weights were calculated for their utility in determining which segments from the theoretical segment pools (e.g., TSP1 and TSP1 plus novel TN1 and N2 segments identified as described in Example 7) should be included in a synthetic library. Segment usage weights were obtained by utilization of the matching method described above and Equation 2:

$$w ( i ) = \frac{1}{{S}_{m}} {\sum }_{j = 1}^{{S}_{m}} \frac{1}{g ( j )} {\sum }_{k = 1}^{g ( j )} {f}_{i} ( k ) \qquad Equation 2$$

where,
[0286] w(i): Weight for segment i. 0≦w(i)≦1.
[0287] Sₘ: Number of sequences (out of total Sin the reference CDRH3 set) which contain one or more best matches with no more than m amino acid mismatches in the specified region of the reference CDRH3 sequence. Here, the mismatches are computed over the Kabat-CDRH3 region, but other fragments of the CDRH3 sequences may also be considered. A constant value of m=3 was used here, but other values may be used, or the value may depend on the length of the reference CDRH3 sequence.
[0288] g(j): Total number of degenerate segment combinations producing the best match to the reference CDRH3 sequence j.
[0289] fᵢ (k): Fractional amino acid identity of TN1, DH, N2 or H3-JH segment in degenerate match k, relative to the corresponding sequence fragment in the reference CDRH3 sequence j. The fractional amino acid identity equals zero if the segment does not appear in match k. Other definitions off, such as amino acid similarity (e.g., based on physicochemical properties of the amino acids such as hydrophobicity), instead of identity, may be also used.

[0290] The procedure for calculating segment usage weights will be further exemplified below. In each of these examples, the best match combinations from TSP1 are provided for a single CDRH3 sequence (Sₘ=1) and the degeneracy (k) and fractional mismatch (f) dependent weight calculations are explained.

### Example 8.1

### Segment Usage Weights for Test Case 1 in Table 9

[0291] Refer to Test Case 1 in Table 9. The CDRH3 sequence RTAHHFDY is identically located in TSP1 (f=1, subscripts dropped for simplicity) via a unique segment combination (g=1). Table 18 provides the usage weights for the segments corresponding to the best match from TSP1 for the CDRH3 of Test Case 1.

### Example 8.2

### Segment Usage Weights for Test Cases 2.1 and 2.2 in Table 9

[0292] Refer to Test Cases 2.1 and 2.2 in Table 9. The CDRH3 sequence VGIVGAASY may be identically located in TSP1 (f=1) via two distinct segment combinations (g=2). Table 19 provides the usage weights for the segments corresponding to the best match from TSP1 for the CDRH3 of Test Cases 2.1 and 2.2.

### Example 8.3

### Segment Usage Weights for Test Case 3.1 in Table 9

[0293] Refer to Test Case 3.1 in Table 9. The CDRH3 sequence DRYSGHDLGY may be identically located in TSP1 via a unique segment combination (g=1) with a single amino acid difference. As provided below, the TN1, N2 and H3-JH segments match the corresponding reference sequence fragments identically, while four of the five DH amino acids match identically.

| | |
|---|---|
| Sequence from the HPS: | DR-YSGHD-LG-Y |
| Nearest Neighbor in TSP1: | DR-YSGYD-LG-Y |

Thus, here

$$\begin{matrix}f = 4 \text{/} 5 for the DH segment ; and \\ = 1 for the TN 1 , N 2 , and H 3 \text{-} JH segments ( Table 20 ) .\end{matrix}$$

### Example 8.4

### Matching of Test Cases 4.1 and 4.2 in Table 9

[0294] Refer to test cases 4.1 and 4.2 in Table 9. The CDRH3 sequence GIAAADSNWLDP may be located in TSP1 via two distinct segment combinations (g=2), each with a single amino acid difference. As provided below, the TN1, DH and N2 segments match the corresponding reference sequence fragments identically, while five of the six H3-JH amino acids match identically.

| | |
|---|---|
| Sequence from HPS: | (−)-GIAAA-D-SNWLDP |
| Nearest Neighbor in TSP1: | (−)-GIAAA-D-SNWFDP |
| Sequence from HPS: | G-IAAA-D-SNWLDP |
| Nearest Neighbor in TSP1: | G-IAAA-D-SNWFDP |

Here, (−) represents the “empty” TN1 segment.

Applying Equation 2 results in the segment usage weights provided in Table 21.

### Example 8.5

### Calculating the Segment Usage Weights for Test Cases 1 to 4.2 of Table 9

[0295] Extending the individual calculations described above to simultaneously include all of Test Cases 1 to 4.2 of Table 9 results in the segment usage weights of Table 22.

### Example 8.6

### Calculating the Segment Usage Weights for Test Cases 5.1 to 5.4 of Table 9

[0296] Refer to the CDRH3 sequence ERTINWGWGVYAFDI and the novel TN1 and N2 segments extracted from the CDRH3 sequence, in Example 7. In this case, the novel TN1 and N2 segments (ERTI and WGV respectively), and the DH and H3-JH segments from TSP1 (NWG and YAFDI respectively) are each assigned usage weights of unity.

### Example 9

### Selection of TN1, DH, N2 and JH Segments for Inclusion in Synthetic Libraries

[0297] FIG. 5 provides the general method used for the design of synthetic CDRH3 libraries. The method uses as input: (1) a theoretical segment pool containing TN1, DH, N2, and H3-JH segments (e.g., TSP plus novel TN1 and N2 segments); and (2) a collection of reference CDRH3 sequences (e.g., the HPS). From these inputs, a particular subset of segments from the theoretical segment pool is selected for inclusion in a physical CDRH3 library.

[0298] First, the best matches to the CDRH3s of the HPS were obtained, from within the TSP1 set, with or without the novel TN1 and N2 segments, using the matching method described above. This data was then used to compute the segment usage weights via Equation 2. Segments were prioritized for inclusion in the physical library based on their relative frequency of occurrence in the CDRH3 sequences of the HPS (as indicated by the segment usage weights), as well as other factors (more fully described below), such as hydrophobicity, alpha-helical propensity, and expressibility in yeast.

### Example 9.1

### Exemplary Library Design (ELD-1)

[0299] ELD-1 uses the HPS and the segments from TSP1 1 (9.5×10⁹ members) as inputs and produces an output of 100 TN1, 200 DH, 141 N2 and 100 H3-JH segments, each from TSP1, ranked in order by their usage weights in the HPS, to produce a library with theoretical complexity of 2.82×10⁸. The segments corresponding to ELD-1 are provided in Table 23. Note that here the combination of all of the segments (i.e., TN1, DH, N2, and H3-JH), and the individual sets of segments (i.e., TN1 only, DH only, N2 only, and H3-JH only) each constitute theoretical segment pools.

### Example 9.2

### Exemplary Library Design 2 (ELD-2)

[0300] The inputs for this design are the HPS and the segments from TSP1 plus the novel TN1 and N2 segments extracted from the HPS (Example 7). The outputs are (1) 200 DH and 100 H3-JH segments, each from TSP1; and (2) 100 TN1 and 200 N2 segments including TN1 and N2 segments originally in TSP1 and those extracted from the sequences in the HPS. Applying the method described in Example 7 to extract novel TN1 and N2 segments (i.e., those not included in TSP1) resulted in the identification of 1,710 novel TN1 segments and 1,024 novel N2 segments. The segments corresponding to ELD-2 are provided in Table 24. Note that here the combination of all of the segments (i.e., TN1, DH, N2, and H3-JH), and the individual sets of segments (i.e., TN1 only, DH only, N2 only, and H3-JH only) each constitute theoretical segment pools. As in ELD-1, all segments in ELD-2 were selected for inclusion based solely on their usage weights in the HPS.

### Example 9.3

### Exemplary Library Design 3 (ELD-3)

[0301] The inputs for this design are identical to those for ELD-2. As in ELD-2, the outputs are (1) a set of 200 DH and 100 H3-JH segments, each from TSP1; and (2) a set of 100 TN1 and 200 N2 segments, including TN1 and N2 segments originally in TSP1 and those extracted from the sequences in the HPS (Example 7). However, the approach used for the selection of the segments for ELD-3 differs in two respects. First, selected physicochemical properties of the segments (hydrophobicity, isoelectric point, and alpha-helix propensity) were used, in addition to the segment usage weights, to prioritize segments for inclusion in the physical library. Hydrophobicity was used to de-prioritize hydrophobic DH segments that are empirically over-represented in poorly expressed antibodies isolated from yeast-based libraries. Isoelectric point and propensity for alpha-helix formation were utilized to identify segments located in regions of physicochemical property space that were relatively unexplored in CDRH3 libraries known in the art (e.g., U.S. Publication Nos. 2009/0181855 and 2010/0056386, and WO/2009/036379). Second, the segment usage weights were calculated via a bootstrap analysis of the HPS dataset. These methods are more fully described below. The segments corresponding to ELD-3 are provided in Table 25. Note that here the combination of all of the segments (i.e., TN1, DH, N2, and H3-JH), and the individual sets of segments (i.e., TN1 only, DH only, N2 only, and H3-JH only) each constitute theoretical segment pools.

### Example 9.3.1

### Generation of Segment Usage Weights Via Bootstrap Analysis

[0302] Bootstrap analysis (Efron & Tibshirani, An Introduction to the Bootstrap, 1994 Chapman Hill, New York) is a widely used statistical procedure for estimating the variability of a statistic of a given sample. This estimate is based on the value of the statistic calculated for several sub-samples, equal in size to the original sample and derived from it via sampling with replacement. Members of the original sample are chosen at random to form the sub-samples, and are typically included multiple times in each sub-sample (hence, “sampling with replacement”).

[0303] Here, the original sample is the HPS dataset with n=3,571 members and the statistic is the segment usage weight. One-thousand sub-samples, each with 3,571 members, were generated by randomly choosing sequences from the HPS dataset (no more than 10 repeats of a given sequence were allowed in each sub-sample). The matching method described above was then applied to each sub-sample, and the final segment usage weights were calculated as the average of the values obtained for the individual sub-samples. Average values derived via this bootstrap procedure are more robust than values calculated from the parent HPS dataset alone. Unless indicated otherwise, these average values of the 1,000 sub-samples were used in the selection of segments for ELD-3.

### Example 9.3.2

### Amino Acid Property Indices

[0304] The AAindex database, available online at www.genome.ip/aaindex/, provides more than 500 numerical indices representing various physicochemical and biochemical properties of amino acids and pairs of amino acids. These properties include hydrophobicity, electrostatic behavior, secondary structure propensities and other characteristics, with several indices often available for a given property. The following three indices were chosen by starting with the well-understood Kyte-Doolittle hydropathy index (KYJT820101) and adding the indices most numerically de-correlated from it and each other. They thus potentially describe non-overlapping regions of amino acid property space and were used for analysis and selection of the DH and H3-JH segments for ELD-3:

[0305] 1. KYTJ820101 (hydropathy index)

[0306] 2. LEVM780101(normalized frequency of alpha helix)

[0307] 3. ZIMJ680104 (isoelectric point)

### Example 9.3.3

### Hydrophobic DH Segments are Over-Represented in Poorly Expressed Antibodies Isolated from Yeast-Based Libraries

[0308] Based on protein expression levels from approximately 1200 antibodies expressed in S. cerevisiae, antibodies were classified as either “Good” or “Poor” expressors. The CDRH3 sequence of each antibody in each category was examined to identify sequence features that correlated with the expression level. One such sequence feature is the hydrophobicity of the DH segments calculated using the KYTJ820101 index. FIG. 6 provides the frequency of “Good” and “Poor” expressors as a function of the DH segment hydrophobicity (increasing to the right). The distribution expected from the synthetic library used to isolate these antibodies is also provided as a reference (“Design”). DH segments with the highest hydrophobicity values (far right of the plot) are over-represented (relative to the expectation based on the design) among “Poor” expressors and under-represented among “Good” expressors. Similarly, hydrophilic DH segments (far left) are over-represented among “Good” expressors and under-represented among “Poor” expressors. From this data, it was inferred that the overall expressibility of the antibodies of the library may be improved by synthesizing CDRH3 sequences with fewer hydrophobic DH segments.

### Example 9.3.4

### Selection of the 200 DH Segments for Inclusion in ELD-3

[0309] A set of 71 DH segments from TSP1 were designated as “core” DH segments for automatic inclusion in ELD-3. These segments had the following desirable properties:
[0310] 1. Fifty-three of seventy-one were present within the top 7% of DH segments rank-ordered by segment usage weights from the bootstrap analysis.
[0311] 2. Eighteen of seventy-one were present within the top 7% of DH segments rank-ordered by usage weights derived from antibodies isolated from libraries expressed in S. cerevisiae.

[0312] The remaining 1,040 segments were designated as “non-core.” To complete the set of 200 segments in ELD-3, 129 segments were chosen from the “non-core” pool of segments in the following manner:
[0313] 1. Sixty-five segments were eliminated because they contain either (a) an Asn residue at the last or next-to-last position with the potential to form N-linked glycosylation motifs via combination with N2 amino acids or (b) the amino acid sequence NG, implicated in de-amidation.
[0314] 2. Segments with higher than median values for the KYTJ820101 hydropathy index (median=2.9 for 1K DH) were eliminated from further consideration. In view of the known importance of Tyr for antigen recognition (Fellouse et al., PNAS, 2004, 101: 12467; and Hofstadter et al., J. Mol. Biol., 1999, 285: 805, each incorporated by reference in its entirety), segments containing at least one Tyr residue were retained unless located in the highest hydrophobicity quartile (KYTJ820101 value higher than 9.4). This eliminated 443 segments.
[0315] 3. The final set of 129 segments was obtained by using an objective function that aimed to maximize the Euclidean distance, between the “core” and the remaining 443 “non-core” segments, in a multi-dimensional space defined by the following variables: (1) amino acid mismatches to nearest neighbor; and (2) values of the three physicochemical property indices.

### Example 9.3.5

### Selection of the 100 H3-JH Segments for Inclusion in ELD-3

[0316] One-hundred H3-JH segments were chosen for inclusion in ELD-3 in the following manner.
[0317] 1. Twenty-eight H3-JH segments were selected after being experimentally validated in other libraries containing only these H3-JH segments (see U.S. Publication Nos. 2009/0181855 and 2010/0056386, and WO/2009/036379).
[0318] 2. Fifty-seven segments were selected based on their presence within the top 25% of H3-JH segments rank-ordered by usage weights from the bootstrap analysis described above. These 57 H3-JH segments, plus the 28 H3-JH segments of (1) (i.e., 85 segments total) were designated as the “core” H3-JH segments, which, like the core DH segments, were automatically included in ELD-3.
[0319] 4. Fifteen additional segments were chosen by using an objective function that aimed to maximize the Euclidian distance, between the “core” and the remaining 200 “non-core” segments, in a multi-dimensional space defined by the following variables: (1) amino acid mismatches to nearest neighbor; and (2) values of the three physicochemical property indices.

### Example 9.3.6

### Selection of 100 TN1 and 200 N2 Segments for Inclusion in ELD-3

[0320] TN1 and N2 segments were extracted from the sequences in each sub-sample of the bootstrap procedure, and the 100 TN1 and 200 N2 segments with the highest average segment usage weights were chosen for inclusion into the library, after elimination of sequences with undesirable motifs, namely Cys and Asn residues.

### Example 9.3.7

### Selection of Nucleotide Sequences to Encode the Segments Chosen for Inclusion in ELD-3

[0321] Each of the polypeptide segments chosen for inclusion in the library must be back translated (polypeptide to DNA) into a corresponding oligonucleotide sequence. While a large number of oligonucleotides could possibly encode each polypeptide segment, due to the degeneracy of the genetic code, certain constraints were imposed to select oligonucleotides that were more desirable. First, since ELD-3 was expressed in yeast (S. cerevisiae), codons that are rarely used in yeast were avoided. For example, of the six possible codons for Arg, three: CGA, CGC and CGG are used to encode yeast proteins at rates of under 10% (see, for example, Nakamura et al., Nucleic Acids Res., 2000, 28:292), and therefore those three codons were avoided to the extent possible. Second, since many antibodies are produced in Chinese Hamster Ovary (CHO) cells (after discovery e.g., in yeast), the CCG codon (encoding Pro) was also avoided, since it is rarely used by hamsters (Nakamura et al.)

[0322] A number of restriction enzymes are employed during the actual construction of the CDRH3 oligonucleotide library (see Example 10 of U.S. Pub. No. 2009/0181855). It is thus desirable to avoid the occurrence of recognition motifs for these restriction enzymes within the CDRH3 polynucleotide sequences. Codons are selected at the individual segment level to avoid introducing recognition motifs for restriction enzymes that may be used downstream. Since such motifs may also be generated by combinatorial assembly of the segments, the segment combinations are also checked and, whenever possible, codons are changed to eliminate the occurrence of such motifs. Specifically, three restriction enzymes were used during the construction of the currently exemplified CDRH3 library: BsrDI, BbsI, and AvrII. The first two are type II enzymes with non-palindromic recognition sites. The reverse strand of the oligonucleotides encoding the segments was checked explicitly for recognition sites for these two enzymes. In particular, the reverse strands were checked for the motifs GCAATG and CATTGC (for BsrDI) and GAAGAC and GTCTTC (for BbsI). The recognition motif for AvrII is palindromic so the oligonucleotides were only checked for the sequence CCTAGG. However, AvrII is used only to treat TN1 segments, and thus it is not necessary to evaluate its presence in the other segments or their combinations.

[0323] An additional constraint that was imposed to improve engineering of the polypeptide to polynucleotide conversion was avoidance of consecutive runs of 6 or more of the same type of base, as this is believed to increase errors during solid phase oligonucleotide synthesis. Therefore, DNA sequences for the segments of ELD-3 were chosen to avoid such motifs. The DNA sequences for the ELD-3 segments are included, with the respective polypeptide sequences, in Table 25. One of ordinary skill in the art will readily recognize that these methods can also be applied to any other library, any restriction sites, any number of nucleotide repeats, and/or to avoid the occurrence of any codons considered undesirable in any organism.

### Example 10

### Matching of ELD-3 to Human CDRH3 Datasets and Clinically Relevant Antibodies

[0324] Among the objectives of the invention is to mimic the V-D-J recombination processes underlying the creation of the human CDRH3 repertoire in vivo, thereby increasing the diversity of the CDRH3 library in comparison to other libraries known in the art, while maintaining the human character of CDRH3. One measure of success is the extent to which collections of human reference CDRH3 sequences are represented identically, or via close matches (e.g., less than about 5, 4, 3, or 2 amino acid differences) in any library of the invention. We evaluated this metric using two human CDRH3 sequence reference datasets, both non-overlapping with each other and the HPS: (1) a collection of 666 human CDRH3 sequences (Lee et al., Immunogenetics, 2006, 57: 917; “Lee-666”); and (2) a collection of 3,000 human CDRH3 sequences randomly chosen from the over 200,000 sequences disclosed in Boyd et al., Science Translational Medicine, 2009, 1: 1-8 (“Boyd-3000”). The results of the random sample of the 3,000 human CDRH3 sequences from Boyd et al. was representative of the results of the same analysis as applied to all members of the Boyd et al. set (>200,000 CDRH3 sequences).

[0325] FIG. 7 provides the percentage of CDRH3 sequences in two synthetic libraries, “LUA-141” and ELD-3, that match a sequence from the Lee-666 or Boyd-3000 sets with zero, one, two, three, or more than three amino acid mismatches. Here, “LUA-141” represents a library containing 212 TN1, 278 DH, 141 N2, and 28 H3-JH (see U.S. Publication No. 2009/0181855 for details). In particular, it is notable that ELD-3 exhibits a higher percentage of sequences (12.9% and 12.1% for the Lee-666 and Boyd-3000 sets, respectively) that identically match a reference CDRH3 sequence than LUA-141 (8.4% and 6.3% for the Lee-666 and Boyd-3000 sets, respectively). It is also notable that ELD-3 exhibits a higher cumulative percentage of human CDRH3 sequences found with no more than two amino acid mismatches (54.1% and 52.5% for the Lee-666 and Boyd-3000 sets, respectively) relative to LUA-141 (41.2% and 43.7% for the Lee-666 and Boyd-3000 sets, respectively).

[0326] Another metric by which antibody libraries can be evaluated is their ability to match “clinically relevant” reference CDRH3 sequences. FIG. 8 demonstrates that ELD-3 returns better matches to clinically relevant CDRH3 sequences than the LUA-141 library. Specifically, ELD-3 matches 34 of 55 (62%) clinically validated antibodies within one amino acid, while the LUA-141 library only matches 20 of 55 (37%).

### Example 11

### Comparison of ELD-3 to LUA-141

[0327] ELD-3 has 73 TN1, 92 DH, 119 N2, and 28 H3-JH in common with LUA-141. Thus, 94.5% of the sequences in ELD-3 (4.0×10⁸ members) are different from the LUA-141 library (2.3×10⁸ members). FIG. 9 demonstrates that the combinatorial efficiency of the segments in ELD-3 is greater than that of the segments in LUA-141. Specifically, the ELD-3 segments are more likely to yield a unique CDRH3 than the LUA-141 library segments. This is advantageous, because it allows one to synthesize libraries with increased CDRH3 diversity using fewer segments.

[0328] FIG. 10 provides the amino acid compositions of the Kabat-CDRH3s of LUA-141, ELD-3, and Human CDRH3 sequences from the HPS.

[0329] FIG. 11 provides the Kabat-CDRH3 length distribution of LUA-141, ELD-3, and Human CDRH3 sequences from the HPS.

CDRH3 Libraries Synthesized with Degenerate Oligonucleotides

### Example 12

### Further Increasing CDRH3 Diversity by Utilizing Degenerate Oligonucleotides

[0330] The methods described in this example extend the methods taught above, to produce CDRH3 libraries with more members than those of the libraries described above. In particular, one or two degenerate codons were introduced into the DH and or N2 polynucleotide segments, and (generally) no degenerate codon or one degenerate codon were introduced into the H3-JH segments. Segments with different numbers of degenerate codons are also contemplated; for example DH segments with 0, 1, 2, 3, 4, 5, 6, 7, 8, or more degenerate codons, and H3-JH segments with 0, 1, 2, 3, 4, 5, or more degenerate codons. This results in CDRH3 libraries containing greater than about 10¹¹ (about 2×10¹¹) distinct CDRH3 amino acid sequences that closely reflect properties, such as length and composition among others, of a reference set of human CDRH3 sequences. As described below, the degenerate positions in the DH segments are usually, but not always, the very N- and/or C-terminal positions, or 5′ and 3′ end codons (i.e., not necessarily only the first or last base), respectively, when considering the corresponding oligonucleotide sequences. Degenerate codons were similarly used to synthesize N2 segments. Two hundred of the TN1 segments were as described in ELD-3, although libraries with degenerate TN1 segments, or with alternative choices of TN1 segment sequences, fall within the scope of the invention. An additional one hundred TN1 segments complete the set of 300 TN1 segments for this library. The amino acid and nucleotide sequences are listed in Table 26. It is also possible to use mixtures of trinucleotides instead of, or in addition to, degenerate oligonucleotides in order to allow amino acid type variation at one or more selected positions within “base” or “seed” segment sequences (defined below).

### Example 13

### Selection of DH Segments for Synthesis by Degenerate Oligonucleotides

[0331] The segment usage weights were calculated for the 68K DH Theoretical Segment Pool by comparison to the sequences contained in Boyd et al. The DH segments with a length of three or more amino acids were ranked according to their segment usage weights (as described above), and the top 201 were designated as “seed” sequences. These seed sequences were then varied by selecting certain positions to incorporate degenerate codons. The positions selected for variance, the amino acids types to which they were varied, were determined by comparing the seed sequences to a reference set of 9,171 DH segments that were a subset of the 68K DH Theoretical Segment Pool. These 9,171 DH segments were selected because their segment usage weight in Boyd et al. was significant, meaning that the cumulative segment usage weight (Example 8) is at least 1.0.

[0332] Each of the 201 seed sequences was compared to each of the sequences in the reference set of 9,171 DH segments, and those of identical length and differing at a single position were further considered to inform possible variants of the seed. In this manner, the most variable position for each seed was identified and a set of candidate amino acid types was also identified for each position. Finally, a set of degenerate codons was considered, to identify the codon that most faithfully represented the set of candidate amino acid types for each particular position. Degenerate codons encoding stop codons, Cys residues, N-linked glycosylation motifs (i.e., NXS or NXT, where X is any amino acid type), or deamidation motifs (NG) were eliminated from consideration. This process generated 149 unique degenerate oligonucleotide sequences, which collectively encode 3,566 unique polypeptide sequences. Alternative designs generated according to the same principles were also considered, and those having a larger diversity (in terms of the number of unique polypeptide sequences) and smaller RMAX values (see below) were given preference for inclusion in the libraries of the invention. However, it is also conceivable that different criteria could be used to select DH segments from the 68K DH Theoretical Segment Pool, and that libraries including DH segments selected by these different criteria would also fall within the scope of the invention.

[0333] Because not all degenerate oligonucleotides encode an identical number of polypeptides, the latter do not occur with uniformly identical weights over the entirety of a given theoretical segment pool (i.e., TN1, DH, N2 and H3-JH) contained within a CDRH3 library of the invention. For example, an individual amino acid sequence X encoded by an oligonucleotide of total degeneracy 4 will have a “weight” of ¼, while another individual amino acid sequence, Y, encoded by an oligonucleotide of degeneracy 6 will have a weight of ⅙. Moreover, certain amino acid sequences could be encoded by more than one degenerate oligonucleotide, so their weights will be the sum of the individual contributions by each oligonucleotide. Within a given theoretical segment pool, the ratio of the weight of the most heavily weighted polypeptide to that of the least heavily weighted one, RMAX, is an important design criterion that one would ideally like to minimize. The RMAX value may be defined by length, or overall for all of the segments of any given type (i.e., all the DH segments, or all the H3-JH segments, and so on for the TN1, and/or the N2 segments). Table 27 lists the degenerate oligonucleotide sequences, while Table 28 lists the unique polypeptide sequences resulting from these oligonucleotides. These two tables include the DH dimer segments the design of which is detailed below.

### Example 13.1

### Selection of DH Dimer Segments

[0334] A different method was employed to design a set of degenerate oligonucleotides encoding DH dimer sequences. The method aimed to include all of the 45 dimer sequences in ELD-3 plus as many of the other 400 theoretically possible dimer sequences (i.e., 20 residues possible in each of 2 positions=20*20), minus segments containing Asn (N) residues and excessively hydrophobic dimers (i.e., any dimer combination comprising only F, I, L, M, and/or V residues). This design process ultimately yielded 35 degenerate oligonucleotide sequences encoding 213 unique peptide dimer sequences. As with the selection processes used for all of the other segments of the invention, one or ordinary skill in the art will readily recognize that other criteria could be used to select the DH dimer segments, and that libraries including these segments also fall within the scope of the invention.

[0335] Combining the DH dimer segments with the longer DH segments of Example 13, yielded the final set of DH segments of the currently exemplified library, encoded by a total of 184 oligonucleotides (35 encoding dimers and 149 encoding segments having three or more amino acids) versus the 200 oligonucleotides of ELD-3. The 184 oligonucleotides encode a total of 3,779 unique polypeptide sequences: 213 dimers and 3,566 longer segments of three amino acids or greater.

### Example 14

### Generation of Expanded N2 Diversity

[0336] As described above, ELD-3 contains 200 N2 segments. In the currently exemplified library, the empty N2 segment (i.e., no N2, so that the DH segments are joined directly to the H3-JH segments) and monomer N2 segments were the same as in ELD-3. However, degenerate oligonucleotides were used to generate sets of two-, three-, and four-mers that not only recapitulated all of the corresponding sequences in ELD-3 but also resulted in additional diversity. As with the DH segments, these degenerate oligonucleotides were designed to eliminate Asn (in unsuitable positions) and Cys residues, and stop codons. More specifically, Asn residues were allowed at the first position of trimers and at the first or second position of tetramers whenever the subsequent amino acid was not Gly and the next amino acid was not Ser or Thr, thus avoiding deamidation or N-linked glycosylation motifs within the candidate N2 segments. The N2 theoretical segment pool for the currently exemplified library contains one zero-mer (i.e., no N2 segment), 18 monomer, 279 dimer, 339 trimers, and 90 tetramer N2 amino acid sequences, or 727 segments in total. These amino acid sequences are encoded by 1, 18, 81, 36, and 10 oligonucleotides, respectively, for a total of 146 oligonucleotides. All but the first 19 oligonucleotides, those encoding the zero- and one-mers, are degenerate. Table 29 lists the 146 oligonucleotide sequences, while Table 30 lists the resulting 727 unique polypeptide sequences.

### Example 15

### Generation of Expanded H3-JH Diversity

[0337] Application of nucleotide-level progressive deletions on the 5′ end of the human IGHJ polynucleotide segments down to the point where only the DNA sequence corresponding to FRM4 remained (i.e., no H3-JH remained), followed by systematic 1- or 2-bp completions on the same 5′ end, resulted in 643 unique H3-JH peptide segments after translation (“643 H3-JH Set”). As done with the DH segments, it is possible to rank order each of the 643 segments by their usage weights obtained after comparison to the approximately 237,000 human sequences from Boyd et al., and the top 200 individual sequences, from those devoid of the undesired motifs described above, were chosen to provide the set of H3-JH segments for the currently exemplified library.

[0338] In an alternatively exemplified embodiment, 46 of the 200 H3-JH segments were designed with a two-fold degenerate codon in the first position (i.e., N-terminal or 5′ end, respectively, at the peptide and oligonucleotide level), so that, overall, 200 oligonucleotides would encode 246 unique peptide sequences.

[0339] In yet other alternatively exemplified embodiments, further use of degenerate codons may be conceived to produce libraries encoded by 90, 100, 200 or more oligonucleotides representing up to 500 distinct polypeptide sequences. Preferably, but not necessarily, these up to 500 unique sequences could be a subset of the sequences in the 643 H3-JH reference set described above, or a subset of variants of these sequences. As exemplified above, H3-JH segments containing undesirable polypeptide motifs may be eliminated from the design. The oligonucleotide sequences for the JH segments are listed on Table 31, while the resulting unique polypeptide sequences are provided in Table 32. In Table 31, nucleotide sequences corresponding to the FRM4 region are also provided, but the “peptide length” value refers to the H3-JH portion only. For simplicity, only the H3-JH peptide sequences are included in Table 32.

### Example 16

### Extended Diversity Library Design (EDLD)

[0340] The TN1, DH, H3-JH, and N2 segments selected above, and provided in Tables 26 to 32, were combined to generate an Extended Diversity Library Design (EDLD) with theoretical diversity of about 2×10¹¹ (300 TN1×3,779 DH×727 N2×246 H3-JH). The oligonucleotides encoding the selected segments were chosen according to the principles of Example 9.3.7.

[0341] FIGS. 12-15 illustrate certain characteristics of this design indicating, for example, that about 50% of the approximately 237,000 CDRH3 sequences in Boyd et al. may be recapitulated by library sequences with either one or no mismatches (i.e., by summing the “0” and “1” bins of FIG. 12). The theoretical length distributions (FIG. 13) and amino acid compositions (FIG. 14) of these libraries also match closely the respective characteristics observed in the same set of human CDRH3 sequences. FIG. 15 shows the combinatorial efficiency of the Extended Diversity Library Design. Approximately 65% of the sequences appear only once in the design (i.e., are generated via one non-degenerate combination of segments). FIG. 8, previously presented, shows that the Extended Diversity Library Design outperforms both LUA-141 and ELD-3 in terms of matching to clinically relevant human antibody sequences.

TABLE 1
Germline-like sequences for eight of the
VK chassis provided by the invention.

| | | Germline-Like | SEQ ID |
|---|---|---|---|
| Germline | Junction | CDRL3 Sequence | NO |
| VK1-05 | 1 | QQYNSYST | 1 |
| VK1-05 | 2 | QQYNSYFT | 2 |
| VK1-05 | 3 | QQYNSYLT | 3 |
| VK1-05 | 4 | QQYNSYIT | 4 |
| VK1-05 | 5 | QQYNSYRT | 5 |
| VK1-05 | 6 | QQYNSYWT | 6 |
| VK1-05 | 7 | QQYNSYYT | 7 |
| VK1-05 | 8 | QQYNSYSPT | 8 |
| VK1-05 | 9 | QQYNSYSFT | 9 |
| VK1-05 | 10 | QQYNSYSLT | 10 |
| VK1-05 | 11 | QQYNSYSIT | 11 |
| VK1-05 | 12 | QQYNSYSRT | 12 |
| VK1-05 | 13 | QQYNSYSWT | 13 |
| VK1-05 | 14 | QQYNSYSYT | 14 |
| VK1-05 | 15 | QQYNSYSPFT | 15 |
| VK1-05 | 16 | QQYNSYSPLT | 16 |
| VK1-05 | 17 | QQYNSYSPIT | 17 |
| VK1-05 | 18 | QQYNSYSPRT | 18 |
| VK1-05 | 19 | QQYNSYSPWT | 19 |
| VK1-05 | 20 | QQYNSYSPYT | 20 |
| VK1-12 | 1 | QQANSFPT | 21 |
| VK1-12 | 2 | QQANSFFT | 22 |
| VK1-12 | 3 | QQANSFLT | 23 |
| VK1-12 | 4 | QQANSFIT | 24 |
| VK1-12 | 5 | QQANSFRT | 25 |
| VK1-12 | 6 | QQANSFWT | 26 |
| VK1-12 | 7 | QQANSFYT | 27 |
| VK1-12 | 8 | QQANSFPPT | 28 |
| VK1-12 | 9 | QQANSFPFT | 29 |
| VK1-12 | 10 | QQANSFPLT | 30 |
| VK1-12 | 11 | QQANSFPIT | 31 |
| VK1-12 | 12 | QQANSFPRT | 32 |
| VK1-12 | 13 | QQANSFPWT | 33 |
| VK1-12 | 14 | QQANSFPYT | 34 |
| VK1-12 | 15 | QQANSFPPFT | 35 |
| VK1-12 | 16 | QQANSFPPLT | 36 |
| VK1-12 | 17 | QQANSFPPIT | 37 |
| VK1-12 | 18 | QQANSFPPRT | 38 |
| VK1-12 | 19 | QQANSFPPWT | 39 |
| VK1-12 | 20 | QQANSFPPYT | 40 |
| VK1-33 | 1 | QQYDNLPT | 41 |
| VK1-33 | 2 | QQYDNLFT | 42 |
| VK1-33 | 3 | QQYDNLLT | 43 |
| VK1-33 | 4 | QQYDNLIT | 44 |
| VK1-33 | 5 | QQYDNLRT | 45 |
| VK1-33 | 6 | QQYDNLWT | 46 |
| VK1-33 | 7 | QQYDNLYT | 47 |
| VK1-33 | 8 | QQYDNLPPT | 48 |
| VK1-33 | 9 | QQYDNLPFT | 49 |
| VK1-33 | 10 | QQYDNLPLT | 50 |
| VK1-33 | 11 | QQYDNLPIT | 51 |
| VK1-33 | 12 | QQYDNLPRT | 52 |
| VK1-33 | 13 | QQYDNLPWT | 53 |
| VK1-33 | 14 | QQYDNLPYT | 54 |
| VK1-33 | 15 | QQYDNLPPFT | 55 |
| VK1-33 | 16 | QQYDNLPPLT | 56 |
| VK1-33 | 17 | QQYDNLPPIT | 57 |
| VK1-33 | 18 | QQYDNLPPRT | 58 |
| VK1-33 | 19 | QQYDNLPPWT | 59 |
| VK1-33 | 20 | QQYDNLPPYT | 60 |
| VK1-39 | 1 | QQSYSTPT | 61 |
| VK1-39 | 2 | QQSYSTFT | 62 |
| VK1-39 | 3 | QQSYSTLT | 63 |
| VK1-39 | 4 | QQSYSTIT | 64 |
| VK1-39 | 5 | QQSYSTRT | 65 |
| VK1-39 | 6 | QQSYSTWT | 66 |
| VK1-39 | 7 | QQSYSTYT | 67 |
| VK1-39 | 8 | QQSYSTPPT | 68 |
| VK1-39 | 9 | QQSYSTPFT | 69 |
| VK1-39 | 10 | QQSYSTPLT | 70 |
| VK1-39 | 11 | QQSYSTPIT | 71 |
| VK1-39 | 12 | QQSYSTPRT | 72 |
| VK1-39 | 13 | QQSYSTPWT | 73 |
| VK1-39 | 14 | QQSYSTPYT | 74 |
| VK1-39 | 15 | QQSYSTPPFT | 75 |
| VK1-39 | 16 | QQSYSTPPLT | 76 |
| VK1-39 | 17 | QQSYSTPPIT | 77 |
| VK1-39 | 18 | QQSYSTPPRT | 78 |
| VK1-39 | 19 | QQSYSTPPWT | 79 |
| VK1-39 | 20 | QQSYSTPPYT | 80 |
| VK4-01 | 1 | QQYYSTPT | 81 |
| VK4-01 | 2 | QQYYSTFT | 82 |
| VK4-01 | 3 | QQYYSTLT | 83 |
| VK4-01 | 4 | QQYYSTIT | 84 |
| VK4-01 | 5 | QQYYSTRT | 85 |
| VK4-01 | 6 | QQYYSTWT | 86 |
| VK4-01 | 7 | QQYYSTYT | 87 |
| VK4-01 | 8 | QQYYSTPPT | 88 |
| VK4-01 | 9 | QQYYSTPFT | 89 |
| VK4-01 | 10 | QQYYSTPLT | 90 |
| VK4-01 | 11 | QQYYSTPIT | 91 |
| VK4-01 | 12 | QQYYSTPRT | 92 |
| VK4-01 | 13 | QQYYSTPWT | 93 |
| VK4-01 | 14 | QQYYSTPYT | 94 |
| VK4-01 | 15 | QQYYSTPPFT | 95 |
| VK4-01 | 16 | QQYYSTPPLT | 96 |
| VK4-01 | 17 | QQYYSTPPIT | 97 |
| VK4-01 | 18 | QQYYSTPPRT | 98 |
| VK4-01 | 19 | QQYYSTPPWT | 99 |
| VK4-01 | 20 | QQYYSTPPYT | 100 |
| VK2-28 | 1 | MQALQTPT | 101 |
| VK2-28 | 2 | MQALQTFT | 102 |
| VK2-28 | 3 | MQALQTLT | 103 |
| VK2-28 | 4 | MQALQTIT | 104 |
| VK2-28 | 5 | MQALQTRT | 105 |
| VK2-28 | 6 | MQALQTWT | 106 |
| VK2-28 | 7 | MQALQTYT | 107 |
| VK2-28 | 8 | MQALQTPPT | 108 |
| VK2-28 | 9 | MQALQTPFT | 109 |
| VK2-28 | 10 | MQALQTPLT | 110 |
| VK2-28 | 11 | MQALQTPIT | 111 |
| VK2-28 | 12 | MQALQTPRT | 112 |
| VK2-28 | 13 | MQALQTPWT | 113 |
| VK2-28 | 14 | MQALQTPYT | 114 |
| VK2-28 | 15 | MQALQTPPFT | 115 |
| VK2-28 | 16 | MQALQTPPLT | 116 |
| VK2-28 | 17 | MQALQTPPIT | 117 |
| VK2-28 | 18 | MQALQTPPRT | 118 |
| VK2-28 | 19 | MQALQTPPWT | 119 |
| VK2-28 | 20 | MQALQTPPYT | 120 |
| VK3-11 | 1 | QQRSNWPT | 121 |
| VK3-11 | 2 | QQRSNWFT | 122 |
| VK3-11 | 3 | QQRSNWLT | 123 |
| VK3-11 | 4 | QQRSNWIT | 124 |
| VK3-11 | 5 | QQRSNWRT | 125 |
| VK3-11 | 6 | QQRSNWWT | 126 |
| VK3-11 | 7 | QQRSNWYT | 127 |
| VK3-11 | 8 | QQRSNWPPT | 128 |
| VK3-11 | 9 | QQRSNWPFT | 129 |
| VK3-11 | 10 | QQRSNWPLT | 130 |
| VK3-11 | 11 | QQRSNWPIT | 131 |
| VK3-11 | 12 | QQRSNWPRT | 132 |
| VK3-11 | 13 | QQRSNWPWT | 133 |
| VK3-11 | 14 | QQRSNWPYT | 134 |
| VK3-11 | 15 | QQRSNWPPFT | 135 |
| VK3-11 | 16 | QQRSNWPPLT | 136 |
| VK3-11 | 17 | QQRSNWPPIT | 137 |
| VK3-11 | 18 | QQRSNWPPRT | 138 |
| VK3-11 | 19 | QQRSNWPPWT | 139 |
| VK3-11 | 20 | QQRSNWPPYT | 140 |
| VK3-15 | 1 | QQYNNWPT | 141 |
| VK3-15 | 2 | QQYNNWFT | 142 |
| VK3-15 | 3 | QQYNNWLT | 143 |
| VK3-15 | 4 | QQYNNWIT | 144 |
| VK3-15 | 5 | QQYNNWRT | 145 |
| VK3-15 | 6 | QQYNNWWT | 146 |
| VK3-15 | 7 | QQYNNWYT | 147 |
| VK3-15 | 8 | QQYNNWPPT | 148 |
| VK3-15 | 9 | QQYNNWPFT | 149 |
| VK3-15 | 10 | QQYNNWPLT | 150 |
| VK3-15 | 11 | QQYNNWPIT | 151 |
| VK3-15 | 12 | QQYNNWPRT | 152 |
| VK3-15 | 13 | QQYNNWPWT | 153 |
| VK3-15 | 14 | QQYNNWPYT | 154 |
| VK3-15 | 15 | QQYNNWPPFT | 155 |
| VK3-15 | 16 | QQYNNWPPLT | 156 |
| VK3-15 | 17 | QQYNNWPPIT | 157 |
| VK3-15 | 18 | QQYNNWPPRT | 158 |
| VK3-15 | 19 | QQYNNWPPWT | 159 |
| VK3-15 | 20 | QQYNNWPPYT | 160 |
| VK3-20 | 1 | QQYGSSPT | 161 |
| VK3-20 | 2 | QQYGSSFT | 162 |
| VK3-20 | 3 | QQYGSSLT | 163 |
| VK3-20 | 4 | QQYGSSIT | 164 |
| VK3-20 | 5 | QQYGSSRT | 165 |
| VK3-20 | 6 | QQYGSSWT | 166 |
| VK3-20 | 7 | QQYGSSYT | 167 |
| VK3-20 | 8 | QQYGSSPPT | 168 |
| VK3-20 | 9 | QQYGSSPFT | 169 |
| VK3-20 | 10 | QQYGSSPLT | 170 |
| VK3-20 | 11 | QQYGSSPIT | 171 |
| VK3-20 | 12 | QQYGSSPRT | 172 |
| VK3-20 | 13 | QQYGSSPWT | 173 |
| VK3-20 | 14 | QQYGSSPYT | 174 |
| VK3-20 | 15 | QQYGSSPPFT | 175 |
| VK3-20 | 16 | QQYGSSPPLT | 176 |
| VK3-20 | 17 | QQYGSSPPIT | 177 |
| VK3-20 | 18 | QQYGSSPPRT | 178 |
| VK3-20 | 19 | QQYGSSPPWT | 179 |
| VK3-20 | 20 | QQYGSSPPYT | 180 |

TABLE 2
Summary of framework variants for exemplified light chain germlines.

| | | Primary | Alternative |
|---|---|---|---|
| | | Framework | Framework |
| | Number of | Positions | Positions |
| Light Chain | Sequences | Selected for | Selected for |
| Germline | Analyzed | Variance | Variance |
| VK1-5 | 307 | 4, 49 | 46 |
| VK1-12 | 113 | 4, 49 | 46, 66 |
| VK1-33 | 188 | 4, 66 | 49 |
| VK1-39 | 656 | 4, 49 | 46 |
| VK2-28 | 275 | 46, 49 | 2, 4 |
| VK3-11 | 375 | 4, 36 | 2, 49 |
| VK3-15 | 202 | 4, 49 | 2, 48 |
| VK3-20 | 867 | 4, 49 | 2, 48 |
| VK4-1 | 368 | 4, 49 | 46, 66 |

TABLE 3
Polypeptide sequences of exemplified light chain chassis with variability in CDRL1,
CDRL2, and frameworks. The Kabat numbers for segment boundaries are
indicated. Here, L1 and L2 (in the “Category” column) indicate variability in
CDRL1 and CDRL2, respectively, while “F” indicates a framework variant.
Sequences designated with both L1 or L2 and F contain variability in both a CDR
and framework region.

| Name | Chassis | Category | FRM1: 1-23 | CDR1: 24-34 | FRM2: 35-49 | CDR2: 50-56 | FRM3: 57-88 | SEQ ID NOs: |
|---|---|---|---|---|---|---|---|---|
| VK1- | VK1-39 | Germline | DIQMTQSPSSLSAS | RASQSISSYLN | WYQQKPGKAPK | AASSLQS | GVPSRFSGSGS | 181 |
| 39 | | | VGDRVTITC | | LLIY | | GTDFTLTISSL | |
| | | | | | | | QPEDFATYYC | |
| VK1- | VK1-39 | L1 | DIQMTQSPSSLSAS | RASQSINSYLN | WYQQKPGKAPK | AASSLQS | GVPSRFSGSGS | 182 |
| 39.1 | | | VGDRVTITC | | LLIY | | GTDFTLTISSL | |
| | | | | | | | QPEDFATYYC | |
| VK1- | VK1-39 | L1 | DIQMTQSPSSLSAS | RASQSIDSYLN | WYQQKPGKAPK | AASSLQS | GVPSRFSGSGS | 183 |
| 39.2 | | | VGDRVTITC | | LLIY | | GTDFTLTISSL | |
| | | | | | | | QPEDFATYYC | |
| VK1- | VK1-39 | L1 | DIQMTQSPSSLSAS | RASQSISRYLN | WYQQKPGKAPK | AASSLQS | GVPSRFSGSGS | 184 |
| 39.3 | | | VGDRVTITC | | LLIY | | GTDFTLTISSL | |
| | | | | | | | QPEDFATYYC | |
| VK1- | VK1-39 | L2 | DIQMTQSPSSLSAS | RASQSISSYLN | WYQQKPGKAPK | GASSLQS | GVPSRFSGSGS | 185 |
| 39.6 | | | VGDRVTITC | | LLIY | | GTDFTLTISSL | |
| | | | | | | | QPEDFATYYC | |
| VK1- | VK1-39 | L2 | DIQMTQSPSSLSAS | RASQSISSYLN | WYQQKPGKAPK | SASSLQS | GVPSRFSGSGS | 186 |
| 39.7 | | | VGDRVTITC | | LLIY | | GTDFTLTISSL | |
| | | | | | | | QPEDFATYYC | |
| VK1- | VK1-39 | L2 | DIQMTQSPSSLSAS | RASQSISSYLN | WYQQKPGKAPK | AASNLQS | GVPSRFSGSGS | 187 |
| 39.8 | | | VGDRVTITC | | LLIY | | GTDFTLTISSL | |
| | | | | | | | QPEDFATYYC | |
| VK1- | VK1-39 | F | DIQLTQSPSSLSAS | RASQSISSYLN | WYQQKPGKAPK | AASSLQS | GVPSRFSGSGS | 188 |
| 39.10 | | | VGDRVTITC | | LLIY | | GTDFTLTISSL | |
| | | | | | | | QPEDFATYYC | |
| VK1- | VK1-39 | FL1 | DIQLTQSPSSLSAS | RASQSINSYLN | WYQQKPGKAPK | AASSLQS | GVPSRFSGSGS | 189 |
| 39.11 | | | VGDRVTITC | | LLIY | | GTDFTLTISSL | |
| | | | | | | | QPEDFATYYC | |
| VK1- | VK1-39 | FL1 | DIQLTQSPSSLSAS | RASQSIDSYLN | WYQQKPGKAPK | AASSLQS | GVPSRFSGSGS | 190 |
| 39.12 | | | VGDRVTITC | | LLIY | | GTDFTLTISSL | |
| | | | | | | | QPEDFATYYC | |
| VK1- | VK1-39 | FL1 | DIQLTQSPSSLSAS | RASQSISSFLN | WYQQKPGKAPK | AASSLQS | GVPSRFSGSGS | 191 |
| 39.15 | | | VGDRVTITC | | LLIY | | GTDFTLTISSL | |
| | | | | | | | QPEDFATYYC | |
| VK1- | VK1-39 | FL2 | DIQLTQSPSSLSAS | RASQSISSYLN | WYQQKPGKAPK | SASSLQS | GVPSRFSGSGS | 192 |
| 39.17 | | | VGDRVTITC | | LLIY | | GTDFTLTISSL | |
| | | | | | | | QPEDFATYYC | |
| VK1- | VK1-39 | FL2 | DIQLTQSPSSLSAS | RASQSISSYLN | WYQQKPGKAPK | AASNLQS | GVPSRFSGSGS | 193 |
| 39.18 | | | VGDRVTITC | | LLIY | | GTDFTLTISSL | |
| | | | | | | | QPEDFATYYC | |
| VK1- | VK1-39 | F | DIQMTQSPSSLSAS | RASQSISSYLN | WYQQKPGKAPK | AASSLQS | GVPSRFSGSGS | 194 |
| 39.20 | | | VGDRVTITC | | LLIS | | GTDFTLTISSL | |
| | | | | | | | QPEDFATYYC | |
| VK1- | VK1-39 | FL1 | DIQMTQSPSSLSAS | RASQSISRYLN | WYQQKPGKAPK | AASSLQS | GVPSRFSGSGS | 195 |
| 39.23 | | | VGDRVTITC | | LLIS | | GTDFTLTISSL | |
| | | | | | | | QPEDFATYYC | |
| VK1- | VK1-39 | FL1 | DIQMTQSPSSLSAS | RASQSISIYLN | WYQQKPGKAPK | AASSLQS | GVPSRFSGSGS | 196 |
| 39.24 | | | VGDRVTITC | | LLIS | | GTDFTLTISSL | |
| | | | | | | | QPEDFATYYC | |
| VK1- | VK1-39 | FL1 | DIQMTQSPSSLSAS | RASQSISSFLN | WYQQKPGKAPK | AASSLQS | GVPSRFSGSGS | 197 |
| 39.25 | | | VGDRVTITC | | LLIS | | GTDFTLTISSL | |
| | | | | | | | QPEDFATYYC | |
| VK1- | VK1-05 | Germline | DIQMTQSPSTLSAS | RASQSISSWLA | WYQQKPGKAPK | DASSLES | GVPSRFSGSGS | 198 |
| 05 | | | VGDRVTITC | | LLIY | | GTEFTLTISSL | |
| | | | | | | | QPDDFATYYC | |
| VK1- | VK1-05 | L1 | DIQMTQSPSTLSAS | RASQGISSWLA | WYQQKPGKAPK | DASSLES | GVPSRFSGSGS | 199 |
| 05.1 | | | VGDRVTITC | | LLIY | | GTEFTLTISSL | |
| | | | | | | | QPDDFATYYC | |
| VK1- | VK1-05 | L2 | DIQMTQSPSTLSAS | RASQSISSWLA | WYQQKPGKAPK | EASSLES | GVPSRFSGSGS | 200 |
| 05.5 | | | VGDRVTITC | | LLIY | | GTEFTLTISSL | |
| | | | | | | | QPDDFATYYC | |
| VK1- | VK1-05 | L2 | DIQMTQSPSTLSAS | RASQSISSWLA | WYQQKPGKAPK | KASSLES | GVPSRFSGSGS | 201 |
| 05.6 | | | VGDRVTITC | | LLIY | | GTEFTLTISSL | |
| | | | | | | | QPDDFATYYC | |
| VK1- | VK1-05 | L12 | DIQMTQSPSTLSAS | RASQAISSWLA | WYQQKPGKAPK | KASSLES | GVPSRFSGSGS | 202 |
| 05.7 | | | VGDRVTITC | | LLIY | | GTEFTLTISSL | |
| | | | | | | | QPDDFATYYC | |
| VK1- | VK1-05 | L12 | DIQMTQSPSTLSAS | RASQSINSWLA | WYQQKPGKAPK | KASSLES | GVPSRFSGSGS | 203 |
| 05.8 | | | VGDRVTITC | | LLIY | | GTEFTLTISSL | |
| | | | | | | | QPDDFATYYC | |
| VK1- | VK1-05 | L12 | DIQMTQSPSTLSAS | RASQSIGSWLA | WYQQKPGKAPK | KASSLES | GVPSRFSGSGS | 204 |
| 05.9 | | | VGDRVTITC | | LLIY | | GTEFTLTISSL | |
| | | | | | | | QPDDFATYYC | |
| VK1- | VK1-05 | F | DIQLTQSPSTLSAS | RASQSISSWLA | WYQQKPGKAPK | DASSLES | GVPSRFSGSGS | 205 |
| 05.10 | | | VGDRVTITC | | LLIY | | GTEFTLTISSL | |
| | | | | | | | QPDDFATYYC | |
| VK1- | VK1-05 | FL1 | DIQLTQSPSTLSAS | RASQGISSWLA | WYQQKPGKAPK | DASSLES | GVPSRFSGSGS | 206 |
| 05.11 | | | VGDRVTITC | | LLIY | | GTEFTLTISSL | |
| | | | | | | | QPDDFATYYC | |
| VK1- | VK1-05 | FL1 | DIQLTQSPSTLSAS | RASQAISSWLA | WYQQKPGKAPK | DASSLES | GVPSRFSGSGS | 207 |
| 05.12 | | | VGDRVTITC | | LLIY | | GTEFTLTISSL | |
| | | | | | | | QPDDFATYYC | |
| VK1- | VK1-05 | FL1 | DIQLTQSPSTLSAS | RASQSIGSWLA | WYQQKPGKAPK | DASSLES | GVPSRFSGSGS | 208 |
| 05.14 | | | VGDRVTITC | | LLIY | | GTEFTLTISSL | |
| | | | | | | | QPDDFATYYC | |
| VK1- | VK1-05 | F | DIQMTQSPSTLSAS | RASQSISSWLA | WYQQKPGKAPK | DASSLES | GVPSRFSGSGS | 209 |
| 05.20 | | | VGDRVTITC | | LLIS | | GTEFTLTISSL | |
| | | | | | | | QPDDFATYYC | |
| VK1- | VK1-05 | FL1 | DIQMTQSPSTLSAS | RASQSINSWLA | WYQQKPGKAPK | DASSLES | GVPSRFSGSGS | 210 |
| 05.21 | | | VGDRVTITC | | LLIS | | GTEFTLTISSL | |
| | | | | | | | QPDDFATYYC | |
| VK1- | VK1-05 | FL2 | DIQLTQSPSTLSAS | RASQSIGSWLA | WYQQKPGKAPK | KASSLES | GVPSRFSGSGS | 211 |
| 05.25 | | | VGDRVTITC | | LLIY | | GTEFTLTISSL | |
| | | | | | | | QPDDFATYYC | |
| VK1- | VK1-05 | FL2 | DIQMTQSPSTLSAS | RASQSISSWLA | WYQQKPGKAPK | KASSLES | GVPSRFSGSGS | 212 |
| 05.26 | | | VGDRVTITC | | LLIS | | GTEFTLTISSL | |
| | | | | | | | QPDDFATYYC | |
| VK1- | VK1-12 | Germline | DIQMTQSPSSVSAS | RASQGISSWLA | WYQQKPGKAPK | AASSLQS | GVPSRFSGSGS | 213 |
| 12 | | | VGDRVTITC | | LLIY | | GTDFTLTISSL | |
| | | | | | | | QPEDFATYYC | |
| VK1- | VK1-12 | L1 | DIQMTQSPSSVSAS | RASQGIGSWLA | WYQQKPGKAPK | AASSLQS | GVPSRFSGSGS | 214 |
| 12.2 | | | VGDRVTITC | | LLIY | | GTDFTLTISSL | |
| | | | | | | | QPEDFATYYC | |
| VK1- | VK1-12 | L1 | DIQMTQSPSSVSAS | RASQGIDSWLA | WYQQKPGKAPK | AASSLQS | GVPSRFSGSGS | 215 |
| 12.3 | | | VGDRVTITC | | LLIY | | GTDFTLTISSL | |
| | | | | | | | QPEDFATYYC | |
| VK1- | VK1-12 | L1 | DIQMTQSPSSVSAS | RASQGISRWLA | WYQQKPGKAPK | AASSLQS | GVPSRFSGSGS | 216 |
| 12.4 | | | VGDRVTITC | | LLIY | | GTDFTLTISSL | |
| | | | | | | | QPEDFATYYC | |
| VK1- | VK1-12 | L2 | DIQMTQSPSSVSAS | RASQGISSWLA | WYQQKPGKAPK | GASSLQS | GVPSRFSGSGS | 217 |
| 12.5 | | | VGDRVTITC | | LLIY | | GTDFTLTISSL | |
| | | | | | | | QPEDFATYYC | |
| VK1- | VK1-12 | L2 | DIQMTQSPSSVSAS | RASQGISSWLA | WYQQKPGKAPK | SASSLQS | GVPSRFSGSGS | 218 |
| 12.6 | | | VGDRVTITC | | LLIY | | GTDFTLTISSL | |
| | | | | | | | QPEDFATYYC | |
| VK1- | VK1-12 | L2 | DIQMTQSPSSVSAS | RASQGISSWLA | WYQQKPGKAPK | AASNLQS | GVPSRFSGSGS | 219 |
| 12.7 | | | VGDRVTITC | | LLIY | | GTDFTLTISSL | |
| | | | | | | | QPEDFATYYC | |
| VK1- | VK1-12 | F | DIQLTQSPSSVSAS | RASQGISSWLA | WYQQKPGKAPK | AASSLQS | GVPSRFSGSGS | 220 |
| 12.10 | | | VGDRVTITC | | LLIY | | GTDFTLTISSL | |
| | | | | | | | QPEDFATYYC | |
| VK1- | VK1-12 | FL1 | DIQLTQSPSSVSAS | RASQDISSWLA | WYQQKPGKAPK | AASSLQS | GVPSRFSGSGS | 221 |
| 12.11 | | | VGDRVTITC | | LLIY | | GTDFTLTISSL | |
| | | | | | | | QPEDFATYYC | |
| VK1- | VK1-12 | FL1 | DIQLTQSPSSVSAS | RASQGISRWLA | WYQQKPGKAPK | AASSLQS | GVPSRFSGSGS | 222 |
| 12.14 | | | VGDRVTITC | | LLIY | | GTDFTLTISSL | |
| | | | | | | | QPEDFATYYC | |
| VK1- | VK1-12 | FL2 | DIQLTQSPSSVSAS | RASQGISSWLA | WYQQKPGKAPK | GASSLQS | GVPSRFSGSGS | 223 |
| 12.15 | | | VGDRVTITC | | LLIY | | GTDFTLTISSL | |
| | | | | | | | QPEDFATYYC | |
| VK1- | VK1-12 | FL2 | DIQLTQSPSSVSAS | RASQGISSWLA | WYQQKPGKAPK | SASSLQS | GVPSRFSGSGS | 224 |
| 12.16 | | | VGDRVTITC | | LLIY | | GTDFTLTISSL | |
| | | | | | | | QPEDFATYYC | |
| VK1- | VK1-12 | FL2 | DIQLTQSPSSVSAS | RASQGISSWLA | WYQQKPGKAPK | AASNLQS | GVPSRFSGSGS | 225 |
| 12.17 | | | VGDRVTITC | | LLIY | | GTDFTLTISSL | |
| | | | | | | | QPEDFATYYC | |
| VK1- | VK1-12 | F | DIQMTQSPSSVSAS | RASQGISSWLA | WYQQKPGKAPK | AASSLQS | GVPSRFSGSGS | 226 |
| 12.20 | | | VGDRVTITC | | LLIS | | GTDFTLTISSL | |
| | | | | | | | QPEDFATYYC | |
| VK1- | VK1-12 | FL1 | DIQMTQSPSSVSAS | RASQDISSWLA | WYQQKPGKAPK | AASSLQS | GVPSRFSGSGS | 227 |
| 12.21 | | | VGDRVTITC | | LLIS | | GTDFTLTISSL | |
| | | | | | | | QPEDFATYYC | |
| VK1- | VK1-12 | FL1 | DIQMTQSPSSVSAS | RASQGIDSWLA | WYQQKPGKAPK | AASSLQS | GVPSRFSGSGS | 228 |
| 12.23 | | | VGDRVTITC | | LLIS | | GTDFTLTISSL | |
| | | | | | | | QPEDFATYYC | |
| VK1- | VK1-12 | FL1 | DIQMTQSPSSVSAS | RASQGISRWLA | WYQQKPGKAPK | AASSLQS | GVPSRFSGSGS | 229 |
| 12.24 | | | VGDRVTITC | | LLIS | | GTDFTLTISSL | |
| | | | | | | | QPEDFATYYC | |
| VK1- | VK1-33 | Germline | DIQMTQSPSSLSAS | QASQDISNYLN | WYQQKPGKAPK | DASNLET | GVPSRFSGSGS | 230 |
| 33 | | | VGDRVTITC | | LLIY | | GTDFTFTISSL | |
| | | | | | | | QPEDIATYYC | |
| VK1- | VK1-33 | L1 | DIQMTQSPSSLSAS | QASQDITNYLN | WYQQKPGKAPK | DASNLET | GVPSRFSGSGS | 231 |
| 33.1 | | | VGDRVTITC | | LLIY | | GTDFTFTISSL | |
| | | | | | | | QPEDIATYYC | |
| VK1- | VK1-33 | L1 | DIQMTQSPSSLSAS | QASQDIANYLN | WYQQKPGKAPK | DASNLET | GVPSRFSGSGS | 232 |
| 33.2 | | | VGDRVTITC | | LLIY | | GTDFTFTISSL | |
| | | | | | | | QPEDIATYYC | |
| VK1- | VK1-33 | L2 | DIQMTQSPSSLSAS | QASQDISNYLN | WYQQKPGKAPK | DASNLAT | GVPSRFSGSGS | 233 |
| 33.8 | | | VGDRVTITC | | LLIY | | GTDFTFTISSL | |
| | | | | | | | QPEDIATYYC | |
| VK1- | VK1-33 | F | DIQLTQSPSSLSAS | QASQDISNYLN | WYQQKPGKAPK | DASNLET | GVPSRFSGSGS | 234 |
| 33.10 | | | VGDRVTITC | | LLIY | | GTDFTFTISSL | |
| | | | | | | | QPEDIATYYC | |
| VK1- | VK1-33 | FL1 | DIQLTQSPSSLSAS | QASQDISNSLN | WYQQKPGKAPK | DASNLET | GVPSRFSGSGS | 235 |
| 33.13 | | | VGDRVTITC | | LLIY | | GTDFTFTISSL | |
| | | | | | | | QPEDIATYYC | |
| VK1- | VK1-33 | FL1 | DIQLTQSPSSLSAS | QASQDISNFLN | WYQQKPGKAPK | DASNLET | GVPSRFSGSGS | 236 |
| 33.14 | | | VGDRVTITC | | LLIY | | GTDFTFTISSL | |
| | | | | | | | QPEDIATYYC | |
| VK1- | VK1-33 | FL2 | DIQLTQSPSSLSAS | QASQDISNYLN | WYQQKPGKAPK | DASNLQT | GVPSRFSGSGS | 237 |
| 33.17 | | | VGDRVTITC | | LLIY | | GTDFTFTISSL | |
| | | | | | | | QPEDIATYYC | |
| VK1- | VK1-33 | F | DIQMTQSPSSLSAS | QASQDISNYLN | WYQQKPGKAPK | DASNLET | GVPSRFSGSRS | 238 |
| 33.20 | | | VGDRVTITC | | LLIY | | GTDFTFTISSL | |
| | | | | | | | QPEDIATYYC | |
| VK1- | VK1-33 | FL1 | DIQMTQSPSSLSAS | QASQDITNYLN | WYQQKPGKAPK | DASNLET | GVPSRFSGSRS | 239 |
| 33.21 | | | VGDRVTITC | | LLIY | | GTDFTFTISSL | |
| | | | | | | | QPEDIATYYC | |
| VK1- | VK1-33 | FL1 | DIQMTQSPSSLSAS | QASQDIANYLN | WYQQKPGKAPK | DASNLET | GVPSRFSGSRS | 240 |
| 33.22 | | | VGDRVTITC | | LLIY | | GTDFTFTISSL | |
| | | | | | | | QPEDIATYYC | |
| VK1- | VK1-33 | FL1 | DIQMTQSPSSLSAS | QASQDISNSLN | WYQQKPGKAPK | DASNLET | GVPSRFSGSRS | 241 |
| 33.23 | | | VGDRVTITC | | LLIY | | GTDFTFTISSL | |
| | | | | | | | QPEDIATYYC | |
| VK1- | VK1-33 | FL1 | DIQMTQSPSSLSAS | QASQDISNFLN | WYQQKPGKAPK | DASNLET | GVPSRFSGSRS | 242 |
| 33.24 | | | VGDRVTITC | | LLIY | | GTDFTFTISSL | |
| | | | | | | | QPEDIATYYC | |
| VK2- | VK2-28 | Germline | DIVMTQSPLSLPVT | RSSQSLLHSN | WYLQKPGQSPQ | LGSNRAS | GVPDRFSGSGS | 243 |
| 28 | | | PGEPASISC | GYNYLD | LLIY | | GTDFTLKISRV | |
| | | | | | | | EAEDVGVYYC | |
| VK2- | VK2-28 | L1 | DIVMTQSPLSLPVT | RSSQSLLYSN | WYLQKPGQSPQ | LGSNRAS | GVPDRFSGSGS | 244 |
| 28.1 | | | PGEPASISC | GYNYLD | LLIY | | GTDFTLKISRV | |
| | | | | | | | EAEDVGVYYC | |
| VK2- | VK2-28 | L1 | DIVMTQSPLSLPVT | RSSQSLLHRN | WYLQKPGQSPQ | LGSNRAS | GVPDRFSGSGS | 245 |
| 28.2 | | | PGEPASISC | GYNYLD | LLIY | | GTDFTLKISRV | |
| | | | | | | | EAEDVGVYYC | |
| VK2- | VK2-28 | L1 | DIVMTQSPLSLPVT | RSSQSLLHTN | WYLQKPGQSPQ | LGSNRAS | GVPDRFSGSGS | 246 |
| 28.3 | | | PGEPASISC | GYNYLD | LLIY | | GTDFTLKISRV | |
| | | | | | | | EAEDVGVYYC | |
| VK2- | VK2-28 | L1 | DIVMTQSPLSLPVT | RSSQSLLHSN | WYLQKPGQSPQ | LGSNRAS | GVPDRFSGSGS | 247 |
| 28.4 | | | PGEPASISC | GNNYLD | LLIY | | GTDFTLKISRV | |
| | | | | | | | EAEDVGVYYC | |
| VK2- | VK2-28 | L2 | DIVMTQSPLSLPVT | RSSQSLLHSN | WYLQKPGQSPQ | LASNRAS | GVPDRFSGSGS | 248 |
| 28.5 | | | PGEPASISC | GYNYLD | LLIY | | GTDFTLKISRV | |
| | | | | | | | EAEDVGVYYC | |
| VK2- | VK2-28 | L2 | DIVMTQSPLSLPVT | RSSQSLLHSN | WYLQKPGQSPQ | LGSHRAS | GVPDRFSGSGS | 249 |
| 28.6 | | | PGEPASISC | GYNYLD | LLIY | | GTDFTLKISRV | |
| | | | | | | | EAEDVGVYYC | |
| VK2- | VK2-28 | F | DIVMTQSPLSLPVT | RSSQSLLHSN | WYLQKPGQSPQ | LGSNRAS | GVPDRFSGSGS | 250 |
| 28.10 | | | PGEPASISC | GYNYLD | VLIY | | GTDFTLKISRV | |
| | | | | | | | EAEDVGVYYC | |
| VK2- | VK2-28 | L1 | DIVMTQSPLSLPVT | RSSQSLLYSN | WYLQKPGQSPQ | LGSNRAS | GVPDRFSGSGS | 251 |
| 28.11 | | | PGEPASISC | GYNYLD | VLIY | | GTDFTLKISRV | |
| | | | | | | | EAEDVGVYYC | |
| VK2- | VK2-28 | FL2 | DIVMTQSPLSLPVT | RSSQSLLHSN | WYLQKPGQSPQ | LASNRAS | GVPDRFSGSGS | 252 |
| 28.15 | | | PGEPASISC | GYNYLD | VLIY | | GTDFTLKISRV | |
| | | | | | | | EAEDVGVYYC | |
| VK2- | VK2-28 | FL2 | DIVMTQSPLSLPVT | RSSQSLLHSN | WYLQKPGQSPQ | LGSSRAS | GVPDRFSGSGS | 253 |
| 28.17 | | | PGEPASISC | GYNYLD | VLIY | | GTDFTLKISRV | |
| | | | | | | | EAEDVGVYYC | |
| VK2- | VK2-28 | F | DIVMTQSPLSLPVT | RSSQSLLHSN | WYLQKPGQSPQ | LGSNRAS | GVPDRFSGSGS | 254 |
| 28.20 | | | PGEPASISC | GYNYLD | LLIF | | GTDFTLKISRV | |
| | | | | | | | EAEDVGVYYC | |
| VK2- | VK2-28 | FL1 | DIVMTQSPLSLPVT | RSSQSLLHSN | WYLQKPGQSPQ | LGSNRAS | GVPDRFSGSGS | 255 |
| 28.24 | | | PGEPASISC | GNNYLD | LLIF | | GTDFTLKISRV | |
| | | | | | | | EAEDVGVYYC | |
| VK3- | VK3-11 | Germline | EIVLTQSPATLSLS | RASQSVSSYLA | WYQQKPGQAPR | DASNRAT | GIPARFSGSGS | 256 |
| 11 | | | PGERATLSC | | LLIY | | GTDFTLTISSL | |
| | | | | | | | EPEDFAVYYC | |
| VK3- | VK3-11 | L1 | EIVLTQSPATLSLS | RASQSVSRYLA | WYQQKPGQAPR | DASNRAT | GIPARFSGSGS | 257 |
| 11.2 | | | PGERATLSC | | LLIY | | GTDFTLTISSL | |
| | | | | | | | EPEDFAVYYC | |
| VK3- | VK3-11 | L1 | EIVLTQSPATLSLS | RASQSVSNYLA | WYQQKPGQAPR | DASNRAT | GIPARFSGSGS | 258 |
| 11.3 | | | PGERATLSC | | LLIY | | GTDFTLTISSL | |
| | | | | | | | EPEDFAVYYC | |
| VK3- | VK3-11 | L2 | EIVLTQSPATLSLS | RASQSVSSYLA | WYQQKPGQAPR | DSSNRAT | GIPARFSGSGS | 259 |
| 11.4 | | | PGERATLSC | | LLIY | | GTDFTLTISSL | |
| | | | | | | | EPEDFAVYYC | |
| VK3- | VK3-11 | L2 | EIVLTQSPATLSLS | RASQSVSSYLA | WYQQKPGQAPR | DTSNRAT | GIPARFSGSGS | 260 |
| 11.5 | | | PGERATLSC | | LLIY | | GTDFTLTISSL | |
| | | | | | | | EPEDFAVYYC | |
| VK3- | VK3-11 | L2 | EIVLTQSPATLSLS | RASQSVSSYLA | WYQQKPGQAPR | DASKRAT | GIPARFSGSGS | 261 |
| 11.6 | | | PGERATLSC | | LLIY | | GTDFTLTISSL | |
| | | | | | | | EPEDFAVYYC | |
| VK3- | VK3-11 | F | EIVMTQSPATLSLS | RASQSVSSYLA | WYQQKPGQAPR | DASNRAT | GIPARFSGSGS | 262 |
| 11.10 | | | PGERATLSC | | LLIY | | GTDFTLTISSL | |
| | | | | | | | EPEDFAVYYC | |
| VK3- | VK3-11 | FL1 | EIVMTQSPATLSLS | RASQSVSNYLA | WYQQKPGQAPR | DASNRAT | GIPARFSGSGS | 263 |
| 11.13 | | | PGERATLSC | | LLIY | | GTDFTLTISSL | |
| | | | | | | | EPEDFAVYYC | |
| VK3- | VK3-11 | FL2 | EIVMTQSPATLSLS | RASQSVSSYLA | WYQQKPGQAPR | DSSNRAT | GIPARFSGSGS | 264 |
| 11.14 | | | PGERATLSC | | LLIY | | GTDFTLTISSL | |
| | | | | | | | EPEDFAVYYC | |
| VK3- | VK3-11 | FL2 | EIVMTQSPATLSLS | RASQSVSSYLA | WYQQKPGQAPR | DTSNRAT | GIPARFSGSGS | 265 |
| 11.15 | | | PGERATLSC | | LLIY | | GTDFTLTISSL | |
| | | | | | | | EPEDFAVYYC | |
| VK3- | VK3-11 | FL2 | EIVMTQSPATLSLS | RASQSVSSYLA | WYQQKPGQAPR | DASKRAT | GIPARFSGSGS | 266 |
| 11.16 | | | PGERATLSC | | LLIY | | GTDFTLTISSL | |
| | | | | | | | EPEDFAVYYC | |
| VK3- | VK3-11 | F | EIVLTQSPATLSLS | RASQSVSSYLA | WFQQKPGQAPR | DASNRAT | GIPARFSGSGS | 267 |
| 11.20 | | | PGERATLSC | | LLIY | | GTDFTLTISSL | |
| | | | | | | | EPEDFAVYYC | |
| VK3- | VK3-11 | FL1 | EIVLTQSPATLSLS | RASQSISSYLA | WFQQKPGQAPR | DASNRAT | GIPARFSGSGS | 268 |
| 11.21 | | | PGERATLSC | | LLIY | | GTDFTLTISSL | |
| | | | | | | | EPEDFAVYYC | |
| VK3- | VK3-11 | FL2 | EIVLTQSPATLSLS | RASQSVSSYLA | WFQQKPGQAPR | DSSNRAT | GIPARFSGSGS | 269 |
| 11.24 | | | PGERATLSC | | LLIY | | GTDFTLTISSL | |
| | | | | | | | EPEDFAVYYC | |
| VK3- | VK3-11 | FL2 | EIVLTQSPATLSLS | RASQSVSSYLA | WFQQKPGQAPR | DTSNRAT | GIPARFSGSGS | 270 |
| 11.25 | | | PGERATLSC | | LLIY | | GTDFTLTISSL | |
| | | | | | | | EPEDFAVYYC | |
| VK3- | VK3-15 | Germline | EIVMTQSPATLSVS | RASQSVSSNLA | WYQQKPGQAPR | GASTRAT | GIPARFSGSGS | 271 |
| 15 | | | PGERATLSC | | LLIY | | GTEFTLTISSL | |
| | | | | | | | QSEDFAVYYC | |
| VK3- | VK3-15 | L1 | EIVMTQSPATLSVS | RASQSVGSNLA | WYQQKPGQAPR | GASTRAT | GIPARFSGSGS | 272 |
| 15.1 | | | PGERATLSC | | LLIY | | GTEFTLTISSL | |
| | | | | | | | QSEDFAVYYC | |
| VK3- | VK3-15 | L1 | EIVMTQSPATLSVS | RASQSVSSSLA | WYQQKPGQAPR | GASTRAT | GIPARFSGSGS | 273 |
| 15.6 | | | PGERATLSC | | LLIY | | GTEFTLTISSL | |
| | | | | | | | QSEDFAVYYC | |
| VK3- | VK3-15 | L2 | EIVMTQSPATLSVS | RASQSVSSNLA | WYQQKPGQAPR | DASTRAT | GIPARFSGSGS | 274 |
| 15.7 | | | PGERATLSC | | LLIY | | GTEFTLTISSL | |
| | | | | | | | QSEDFAVYYC | |
| VK3- | VK3-15 | L2 | EIVMTQSPATLSVS | RASQSVSSNLA | WYQQKPGQAPR | SASTRAT | GIPARFSGSGS | 275 |
| 15.8 | | | PGERATLSC | | LLIY | | GTEFTLTISSL | |
| | | | | | | | QSEDFAVYYC | |
| VK3- | VK3-15 | F | EIVLTQSPATLSVS | RASQSVSSNLA | WYQQKPGQAPR | GASTRAT | GIPARFSGSGS | 276 |
| 15.10 | | | PGERATLSC | | LLIY | | GTEFTLTISSL | |
| | | | | | | | QSEDFAVYYC | |
| VK3- | VK3-15 | FL1 | EIVLTQSPATLSVS | RASQSVGSNLA | WYQQKPGQAPR | GASTRAT | GIPARFSGSGS | 277 |
| 15.11 | | | PGERATLSC | | LLIY | | GTEFTLTISSL | |
| | | | | | | | QSEDFAVYYC | |
| VK3- | VK3-15 | FL1 | EIVLTQSPATLSVS | RASQSVSTNLA | WYQQKPGQAPR | GASTRAT | GIPARFSGSGS | 278 |
| 15.14 | | | PGERATLSC | | LLIY | | GTEFTLTISSL | |
| | | | | | | | QSEDFAVYYC | |
| VK3- | VK3-15 | FL1 | EIVLTQSPATLSVS | RASQSVSSDLA | WYQQKPGQAPR | GASTRAT | GIPARFSGSGS | 279 |
| 15.16 | | | PGERATLSC | | LLIY | | GTEFTLTISSL | |
| | | | | | | | QSEDFAVYYC | |
| VK3- | VK3-15 | F | EIVMTQSPATLSVS | RASQSVSSNLA | WYQQKPGQAPR | GASTRAT | GIPARFSGSGS | 280 |
| 15.20 | | | PGERATLSC | | LLIF | | GTEFTLTISSL | |
| | | | | | | | QSEDFAVYYC | |
| VK3- | VK3-15 | FL1 | EIVMTQSPATLSVS | RASQSVGSNLA | WYQQKPGQAPR | GASTRAT | GIPARFSGSGS | 281 |
| 15.21 | | | PGERATLSC | | LLIF | | GTEFTLTISSL | |
| | | | | | | | QSEDFAVYYC | |
| VK3- | VK3-15 | FL1 | EIVMTQSPATLSVS | RASQSVSSDLA | WYQQKPGQAPR | GASTRAT | GIPARFSGSGS | 282 |
| 15.25 | | | PGERATLSC | | LLIF | | GTEFTLTISSL | |
| | | | | | | | QSEDFAVYYC | |
| VK3- | VK3-15 | FL1 | EIVMTQSPATLSVS | RASQSVSSSL | WYQQKPGQAPR | GASTRAT | GIPARFSGSGS | 283 |
| 15.26 | | | PGERATLSC | | LLIF | | GTEFTLTISSL | |
| | | | | | | | QSEDFAVYYC | |
| VK3- | VK3-20 | Germline | EIVLTQSPGTLSLS | RASQSVSSSY | WYQQKPGQAPR | GASSRAT | GIPDRFSGSGS | 284 |
| 20 | | | PGERATLSC | LA | LLIY | | GTDFTLTISRL | |
| | | | | | | | EPEDFAVYYC | |
| VK3- | VK3-20 | L1 | EIVLTQSPGTLSLS | RASQSVRSSY | WYQQKPGQAPR | GASSRAT | GIPDRFSGSGS | 285 |
| 20.1 | | | PGERATLSC | LA | LLIY | | GTDFTLTISRL | |
| | | | | | | | EPEDFAVYYC | |
| VK3- | VK3-20 | L1 | EIVLTQSPGTLSLS | RASQSVSSDY | WYQQKPGQAPR | GASSRAT | GIPDRFSGSGS | 286 |
| 20.4 | | | PGERATLSC | LA | LLIY | | GTDFTLTISRL | |
| | | | | | | | EPEDFAVYYC | |
| VK3- | VK3-20 | L2 | EIVLTQSPGTLSLS | RASQSVSSSY | WYQQKPGQAPR | GASNRAT | GIPDRFSGSGS | 287 |
| 20.7 | | | PGERATLSC | LA | LLIY | | GTDFTLTISRL | |
| | | | | | | | EPEDFAVYYC | |
| VK3- | VK3-20 | L2 | EIVLTQSPGTLSLS | RASQSVSSSY | WYQQKPGQAPR | GASRRAT | GIPDRFSGSGS | 288 |
| 20.8 | | | PGERATLSC | LA | LLIY | | GTDFTLTISRL | |
| | | | | | | | EPEDFAVYYC | |
| VK3- | VK3-20 | F | EIVMTQSPGTLSLS | RASQSVSSSY | WYQQKPGQAPR | GASSRAT | GIPDRFSGSGS | 289 |
| 20.10 | | | PGERATLSC | LA | LLIY | | GTDFTLTISRL | |
| | | | | | | | EPEDFAVYYC | |
| VK3- | VK3-20 | FL2 | EIVMTQSPGTLSLS | RASQSVSSSY | WYQQKPGQAPR | GASNRAT | GIPDRFSGSGS | 290 |
| 20.17 | | | PGERATLSC | LA | LLIY | | GTDFTLTISRL | |
| | | | | | | | EPEDFAVYYC | |
| VK3- | VK3-20 | F | EIVLTQSPGTLSLS | RASQSVSSSY | WYQQKPGQAPR | GASSRAT | GIPDRFSGSGS | 291 |
| 20.20 | | | PGERATLSC | LA | LLIS | | GTDFTLTISRL | |
| | | | | | | | EPEDFAVYYC | |
| VK3- | VK3-20 | FL1 | EIVLTQSPGTLSLS | RASQSVSSNY | WYQQKPGQAPR | GASSRAT | GIPDRFSGSGS | 292 |
| 20.22 | | | PGERATLSC | LA | LLIS | | GTDFTLTISRL | |
| | | | | | | | EPEDFAVYYC | |
| VK4- | VK4-01 | Germline | DIVMTQSPDSLAVS | KSSQSVLYSS | WYQQKPGQPPK | WASTRES | GVPDRFSGSGS | 293 |
| 01 | | | LGERATINC | NNKNYLA | LLIY | | GTDFTLTISSL | |
| | | | | | | | QAEDVAVYYC | |
| VK4- | VK4-01 | L1 | DIVMTQSPDSLAVS | KSSQSLLYSS | WYQQKPGQPPK | WASTRES | GVPDRFSGSGS | 294 |
| 01.1 | | | LGERATINC | NNKNYLA | LLIY | | GTDFTLTISSL | |
| | | | | | | | QAEDVAVYYC | |
| VK4- | VK4-01 | L1 | DIVMTQSPDSLAVS | KSSQSILYSS | WYQQKPGQPPK | WASTRES | GVPDRFSGSGS | 295 |
| 01.2 | | | LGERATINC | NNKNYLA | LLIY | | GTDFTLTISSL | |
| | | | | | | | QAEDVAVYYC | |
| VK4- | VK4-01 | L1 | DIVMTQSPDSLAVS | KSSQSVLHSS | WYQQKPGQPPK | WASTRES | GVPDRFSGSGS | 296 |
| 01.3 | | | LGERATINC | NNKNYLA | LLIY | | GTDFTLTISSL | |
| | | | | | | | QAEDVAVYYC | |
| VK4- | VK4-01 | L1 | DIVMTQSPDSLAVS | KSSQSVLFSS | WYQQKPGQPPK | WASTRES | GVPDRFSGSGS | 297 |
| 01.4 | | | LGERATINC | NNKNYLA | LLIY | | GTDFTLTISSL | |
| | | | | | | | QAEDVAVYYC | |
| VK4- | VK4-01 | L1 | DIVMTQSPDSLAVS | KSSQSVLYTS | WYQQKPGQPPK | WASTRES | GVPDRFSGSGS | 298 |
| 01.5 | | | LGERATINC | NNKNYLA | LLIY | | GTDFTLTISSL | |
| | | | | | | | QAEDVAVYYC | |
| VK4- | VK4-01 | L2 | DIVMTQSPDSLAVS | KSSQSVLYSS | WYQQKPGQPPK | WASSRES | GVPDRFSGSGS | 299 |
| 01.7 | | | LGERATINC | NNKNYLA | LLIY | | GTDFTLTISSL | |
| | | | | | | | QAEDVAVYYC | |
| VK4- | VK4-01 | F | DIVLTQSPDSLAVS | KSSQSVLYSS | WYQQKPGQPPK | WASTRES | GVPDRFSGSGS | 300 |
| 01.10 | | | LGERATINC | NNKNYLA | LLIY | | GTDFTLTISSL | |
| | | | | | | | QAEDVAVYYC | |
| VK4- | VK4-01 | FL1 | DIVLTQSPDSLAVS | KSSQSVLHSS | WYQQKPGQPPK | WASTRES | GVPDRFSGSGS | 301 |
| 01.13 | | | LGERATINC | NNKNYLA | LLIY | | GTDFTLTISSL | |
| | | | | | | | QAEDVAVYYC | |
| VK4- | VK4-01 | FL2 | DIVLTQSPDSLAVS | KSSQSVLYSS | WYQQKPGQPPK | WASSRES | GVPDRFSGSGS | 302 |
| 01.17 | | | LGERATINC | NNKNYLA | LLIY | | GTDFTLTISSL | |
| | | | | | | | QAEDVAVYYC | |
| VK4- | VK4-01 | F | DIVMTQSPDSLAVS | KSSQSVLYSS | WYQQKPGQPPK | WASTRES | GVPDRFSGSGS | 303 |
| 01.20 | | | LGERATINC | NNKNYLA | LLIS | | GTDFTLTISSL | |
| | | | | | | | QAEDVAVYYC | |
| VK4- | VK4-01 | FL1 | DIVMTQSPDSLAVS | KSSQSVLHSS | WYQQKPGQPPK | WASTRES | GVPDRFSGSGS | 304 |
| 01.23 | | | LGERATINC | NNKNYLA | LLIS | | GTDFTLTISSL | |
| | | | | | | | QAEDVAVYYC | |

TABLE 4
Jumping dimer and trimer oligonucleotides for the VK1-39 sequences
with CDRL3 length nine and F as the junctional amino acid. i.e., The
sequences depicted below occur between YYC and FGG, to yield:
...YYC-[89-97]-FGG... .

| Name | Oligo | SEQ ID NO | 89 | 90 | 91 | 92 | 93 | 94 | 95 | 96 | 97 |
|---|---|---|---|---|---|---|---|---|---|---|---|
| | | Jumping Dimer | | | | | | | | | |
| VK1-39_1 | SWMSWMAGC | 305 | DEHLQV | DEHLQV | S | Y | S | T | P | FY | T |
| | TACAGTACT | | | | | | | | | | |
| | CCTTWCACT | | | | | | | | | | |
| VK1-39_2 | SWMCAAVNA | 306 | DEHLQV | Q | AEGIKLPQR | Y | S | T | P | FY | T |
| | TACAGTACT | | | | TV | | | | | | |
| | CCTTWCACT | | | | | | | | | | |
| VK1-39_3 | SWMCAAAGC | 307 | DEHLQV | Q | S | ADFHLPS | S | T | P | FY | T |
| | BHCAGTACT | | | | | VY | | | | | |
| | CCTTWCACT | | | | | | | | | | |
| VK1-39_4 | SWMCAAAGC | 308 | DEHLQV | Q | S | Y | ADFHILNP | T | P | FY | T |
| | TACNHCACT | | | | | | STVY | | | | |
| | CCTTWCACT | | | | | | | | | | |
| VK1-39_5 | SWMCAAAGC | 309 | DEHLQV | Q | S | Y | S | ADFHL | P | FY | T |
| | TACAGTBHC | | | | | | | PSVY | | | |
| | CCTTWCACT | | | | | | | | | | |
| VK1-39_6 | CAGSWMVNA | 310 | Q | DEHLQV | AEGIKLPQR | Y | S | T | P | FY | T |
| | TACAGTACT | | | | TV | | | | | | |
| | CCTTWCACT | | | | | | | | | | |
| VK1-39_7 | CAGSWMAGC | 311 | Q | DEHLQV | S | ADFHLPS | S | T | P | FY | T |
| | BHCAGTACT | | | | | VY | | | | | |
| | CCTTWCACT | | | | | | | | | | |
| VK1-39_8 | CAGSWMAGC | 312 | Q | DEHLQV | S | Y | ADFHILNP | T | P | FY | T |
| | TACNHCACT | | | | | | STVY | | | | |
| | CCTTWCACT | | | | | | | | | | |
| VK1-39_9 | CAGSWMAGC | 313 | Q | DEHLQV | S | Y | S | ADFHL | P | FY | T |
| | TACAGTBHC | | | | | | | PSVY | | | |
| | CCTTWCACT | | | | | | | | | | |
| VK1-39_10 | CAGCAAVNA | 314 | Q | Q | AEGIKLPQR | ADFHLPS | S | T | P | FY | T |
| | BHCAGTACT | | | | TV | VY | | | | | |
| | CCTTWCACT | | | | | | | | | | |
| VK1-39_11 | CAGCAAVNA | 315 | Q | Q | AEGIKLPQR | Y | ADFHILNP | T | P | FY | T |
| | TACNHCACT | | | | TV | | STVY | | | | |
| | CCTTWCACT | | | | | | | | | | |
| VK1-39_12 | CAGCAAVNA | 316 | Q | Q | AEGIKLPQR | Y | S | ADFHL | P | FY | T |
| | TACAGTBHC | | | | TV | | | PSVY | | | |
| | CCTTWCACT | | | | | | | | | | |
| VK1-39_13 | CAGCAAAGC | 317 | Q | Q | S | ADFHLPS | ADFHILNP | T | P | FY | T |
| | BHCNHCACT | | | | | VY | STVY | | | | |
| | CCTTWCACT | | | | | | | | | | |
| VK1-39_14 | CAGCAAAGC | 318 | Q | Q | S | ADFHLPS | S | ADFHL | P | FY | T |
| | BHCAGTBHC | | | | | VY | | PSVY | | | |
| | CCTTWCACT | | | | | | | | | | |
| VK1-39_15 | CAGCAAAGC | 319 | Q | Q | S | Y | ADFHILNP | ADFHL | P | FY | T |
| | TACNHCBHC | | | | | | STVY | PSVY | | | |
| | CCTTWCACT | | | | | | | | | | |
| | | Jumping Trimer | | | | | | | | | |
| VK1- | CAGCAAVNA | 314 | Q | Q | AEGIKLPQR | ADFHLPS | S | T | P | FY | T |
| 39_10_0_9 | BHCAGTACT | | | | TV | VY | | | | | |
| | CCTTWCACT | | | | | | | | | | |
| VK1- | CAGCAAVNA | 315 | Q | Q | AEGIKLPQR | Y | ADFHILNP | T | P | FY | T |
| 39_11_0_9 | TACNHCACT | | | | TV | | STVY | | | | |
| | CCTTWCACT | | | | | | | | | | |
| VK1- | CAGCAAVNA | 316 | Q | Q | AEGIKLPQR | Y | S | ADFHL | P | FY | T |
| 39_12_0_9 | TACAGTBHC | | | | TV | | | PSVY | | | |
| | CCTTWCACT | | | | | | | | | | |
| VK1- | CAGCAAAGC | 317 | Q | Q | S | ADFHLPS | ADFHILNP | T | P | FY | T |
| 39_13_0_9 | BHCNHCACT | | | | | VY | STVY | | | | |
| | CCTTWCACT | | | | | | | | | | |
| VK1- | CAGCAAAGC | 318 | Q | Q | S | ADFHLPS | S | ADFHL | P | FY | T |
| 39_14_0_9 | BHCAGTBHC | | | | | VY | | PSVY | | | |
| | CCTTWCACT | | | | | | | | | | |
| VK1- | CAGCAAAGC | 319 | Q | Q | S | Y | ADFHILNP | ADFHL | P | FY | T |
| 39_15_0_9 | TACNHCBHC | | | | | | STVY | PSVY | | | |
| | CCTTWCACT | | | | | | | | | | |
| VK1- | CAGCAAVNA | 320 | Q | Q | AEGIKLPQR | ADFHLPS | ADFHILNP | T | P | FY | T |
| 39_t1_0_9 | BHCNHCACT | | | | TV | VY | STVY | | | | |
| | CCTTWCACT | | | | | | | | | | |
| VK1- | CAGCAAVNA | | Q | Q | AEGIKLPQR | ADFHLPS | S | ADFHL | P | FY | T |
| 39_t2_0_9 | BHCAGTBHC | | | | TV | VY | | PSVY | | | |
| | CCTTWCACT | | | | | | | | | | |
| VK1- | CAGCAAVNA | | Q | Q | AEGIKLPQR | Y | ADFHILNP | ADFHL | P | FY | T |
| 39_t3_0_9 | TACNHCBHC | | | | TV | | STVY | PSVY | | | |
| | CCTTWCACT | | | | | | | | | | |
| VK1- | CAGCAAAGC | | Q | Q | S | ADFHLPS | ADFHILNP | ADFHL | P | FY | T |
| 39_t4_0_9 | BHCNHCBHC | | | | | VY | STVY | PSVY | | | |
| | CCTTWCACT | | | | | | | | | | |

TABLE 5
Oligonucleotide sequences for exemplary VK jumping dimer and trimer sequences
with CDRL3 length 8.

| | | | | |
|---|---|---|---|---|
| | | Portion of | | |
| | | Oligonucleotide | SEQ ID | SEQ ID NO |
| | Sequence of Synthesized | Corresponding to CDRL3 | NO | (CDRL3 |
| Name | Oligonucleotide | Proper | (Oligo) | Portion) |

Jumping Dimer

| | | | | |
|---|---|---|---|---|
| VK1-05_1_0_8 | CCTGATGATTTTGCAACTTATTACTGCSWMSWMTACA | SWMSWMTACAATAGTTACTWCACT | 324 | 948 |
| | ATAGTTACTWCACTTTTGGCGGAGGGACCAAG | | | |
| VK1- | CCTGATGATTTTGCAACTTATTACTGCCAGCAGBHCV | CAGCAGBHCVRMAGTTACTWCACT | 325 | 949 |
| 05_10_0_8 | RMAGTTACTWCACTTTTGGCGGAGGGACCAAG | | | |
| VK1- | CCTGATGATTTTGCAACTTATTACTGCCAGCAGBHCA | CAGCAGBHCAATMBCTACTWCACT | 326 | 950 |
| 05_11_0_8 | ATMBCTACTWCACTTTTGGCGGAGGGACCAAG | | | |
| VK1- | CCTGATGATTTTGCAACTTATTACTGCCAGCAGBHCA | CAGCAGBHCAATAGTYWCTWCACT | 327 | 951 |
| 05_12_0_8 | ATAGTYWCTWCACTTTTGGCGGAGGGACCAAG | | | |
| VK1- | CCTGATGATTTTGCAACTTATTACTGCCAGCAGTACV | CAGCAGTACVRMMBCTACTWCACT | 328 | 952 |
| 05_13_0_8 | RMMBCTACTWCACTTTTGGCGGAGGGACCAAG | | | |
| VK1- | CCTGATGATTTTGCAACTTATTACTGCCAGCAGTACV | CAGCAGTACVRMAGTYWCTWCACT | 329 | 953 |
| 05_14_0_8 | RMAGTYWCTWCACTTTTGGCGGAGGGACCAAG | | | |
| VK1- | CCTGATGATTTTGCAACTTATTACTGCCAGCAGTACA | CAGCAGTACAATMBCYWCTWCACT | 330 | 954 |
| 05_15_0_8 | ATMBCYWCTWCACTTTTGGCGGAGGGACCAAG | | | |
| VK1-05_2_0_8 | CCTGATGATTTTGCAACTTATTACTGCSWMCAGBHCA | SWMCAGBHCAATAGTTACTWCACT | 331 | 955 |
| | ATAGTTACTWCACTTTTGGCGGAGGGACCAAG | | | |
| VK1-05_3_0_8 | CCTGATGATTTTGCAACTTATTACTGCSWMCAGTACV | SWMCAGTACVRMAGTTACTWCACT | 332 | 956 |
| | RMAGTTACTWCACTTTTGGCGGAGGGACCAAG | | | |
| VK1-05_4_0_8 | CCTGATGATTTTGCAACTTATTACTGCSWMCAGTACA | SWMCAGTACAATMBCTACTWCACT | 333 | 957 |
| | ATMBCTACTWCACTTTTGGCGGAGGGACCAAG | | | |
| VK1-05_5_0_8 | CCTGATGATTTTGCAACTTATTACTGCSWMCAGTACA | SWMCAGTACAATAGTYWCTWCACT | 334 | 958 |
| | ATAGTYWCTWCACTTTTGGCGGAGGGACCAAG | | | |
| VK1-05_6_0_8 | CCTGATGATTTTGCAACTTATTACTGCCAGSWMBHCA | CAGSWMBHCAATAGTTACTWCACT | 335 | 959 |
| | ATAGTTACTWCACTTTTGGCGGAGGGACCAAG | | | |
| VK1-05_7_0_8 | CCTGATGATTTTGCAACTTATTACTGCCAGSWMTACV | CAGSWMTACVRMAGTTACTWCACT | 336 | 960 |
| | RMAGTTACTWCACTTTTGGCGGAGGGACCAAG | | | |
| VK1-05_8_0_8 | CCTGATGATTTTGCAACTTATTACTGCCAGSWMTACA | CAGSWMTACAATMBCTACTWCACT | 337 | 961 |
| | ATMBCTACTWCACTTTTGGCGGAGGGACCAAG | | | |
| VK1-05_9_0_8 | CCTGATGATTTTGCAACTTATTACTGCCAGSWMTACA | CAGSWMTACAATAGTYWCTWCACT | 338 | 962 |
| | ATAGTYWCTWCACTTTTGGCGGAGGGACCAAG | | | |
| VK1-05_1_1_8 | CCTGATGATTTTGCAACTTATTACTGCSWMSWMTACA | SWMSWMTACAATAGTTACMTCACT | 339 | 963 |
| | ATAGTTACMTCACTTTTGGCGGAGGGACCAAG | | | |
| VK1- | CCTGATGATTTTGCAACTTATTACTGCCAGCAGBHCV | CAGCAGBHCVRMAGTTACMTCACT | 340 | 964 |
| 05_10_1_8 | RMAGTTACMTCACTTTTGGCGGAGGGACCAAG | | | |
| VK1- | CCTGATGATTTTGCAACTTATTACTGCCAGCAGBHCA | CAGCAGBHCAATMBCTACMTCACT | 341 | 965 |
| 05_11_1_8 | ATMBCTACMTCACTTTTGGCGGAGGGACCAAG | | | |
| VK1- | CCTGATGATTTTGCAACTTATTACTGCCAGCAGBHCA | CAGCAGBHCAATAGTYWCMTCACT | 342 | 966 |
| 05_12_1_8 | ATAGTYWCMTCACTTTTGGCGGAGGGACCAAG | | | |
| VK1- | CCTGATGATTTTGCAACTTATTACTGCCAGCAGTACV | CAGCAGTACVRMMBCTACMTCACT | 343 | 967 |
| 05_13_1_8 | RMMBCTACMTCACTTTTGGCGGAGGGACCAAG | | | |
| VK1- | CCTGATGATTTTGCAACTTATTACTGCCAGCAGTACV | CAGCAGTACVRMAGTYWCMTCACT | 344 | 968 |
| 05_14_1_8 | RMAGTYWCMTCACTTTTGGCGGAGGGACCAAG | | | |
| VK1- | CCTGATGATTTTGCAACTTATTACTGCCAGCAGTACA | CAGCAGTACAATMBCYWCMTCACT | 345 | 969 |
| 05_15_1_8 | ATMBCYWCMTCACTTTTGGCGGAGGGACCAAG | | | |
| VK1-05_2_1_8 | CCTGATGATTTTGCAACTTATTACTGCSWMCAGBHCA | SWMCAGBHCAATAGTTACMTCACT | 346 | 970 |
| | ATAGTTACMTCACTTTTGGCGGAGGGACCAAG | | | |
| VK1-05_3_1_8 | CCTGATGATTTTGCAACTTATTACTGCSWMCAGTACV | SWMCAGTACVRMAGTTACMTCACT | 347 | 971 |
| | RMAGTTACMTCACTTTTGGCGGAGGGACCAAG | | | |
| VK1-05_4_1_8 | CCTGATGATTTTGCAACTTATTACTGCSWMCAGTACA | SWMCAGTACAATMBCTACMTCACT | 348 | 972 |
| | ATMBCTACMTCACTTTTGGCGGAGGGACCAAG | | | |
| VK1-05_5_1_8 | CCTGATGATTTTGCAACTTATTACTGCSWMCAGTACA | SWMCAGTACAATAGTYWCMTCACT | 349 | 973 |
| | ATAGTYWCMTCACTTTTGGCGGAGGGACCAAG | | | |
| VK1-05_6_1_8 | CCTGATGATTTTGCAACTTATTACTGCCAGSWMBHCA | CAGSWMBHCAATAGTTACMTCACT | 350 | 974 |
| | ATAGTTACMTCACTTTTGGCGGAGGGACCAAG | | | |
| VK1-05_7_1_8 | CCTGATGATTTTGCAACTTATTACTGCCAGSWMTACV | CAGSWMTACVRMAGTTACMTCACT | 351 | 975 |
| | RMAGTTACMTCACTTTTGGCGGAGGGACCAAG | | | |
| VK1-05_8_1_8 | CCTGATGATTTTGCAACTTATTACTGCCAGSWMTACA | CAGSWMTACAATMBCTACMTCACT | 352 | 976 |
| | ATMBCTACMTCACTTTTGGCGGAGGGACCAAG | | | |
| VK1-05_9_1_8 | CCTGATGATTTTGCAACTTATTACTGCCAGSWMTACA | CAGSWMTACAATAGTYWCMTCACT | 353 | 977 |
| | ATAGTYWCMTCACTTTTGGCGGAGGGACCAAG | | | |
| VK1-05_1_2_8 | CCTGATGATTTTGCAACTTATTACTGCSWMSWMTACA | SWMSWMTACAATAGTTACWGGACT | 354 | 978 |
| | ATAGTTACWGGACTTTTGGCGGAGGGACCAAG | | | |
| VK1- | CCTGATGATTTTGCAACTTATTACTGCCAGCAGBHCV | CAGCAGBHCVRMAGTTACWGGACT | 355 | 979 |
| 05_10_2_8 | RMAGTTACWGGACTTTTGGCGGAGGGACCAAG | | | |
| VK1- | CCTGATGATTTTGCAACTTATTACTGCCAGCAGBHCA | CAGCAGBHCAATMBCTACWGGACT | 356 | 980 |
| 05_11_2_8 | ATMBCTACWGGACTTTTGGCGGAGGGACCAAG | | | |
| VK1- | CCTGATGATTTTGCAACTTATTACTGCCAGCAGBHCA | CAGCAGBHCAATAGTYWCWGGACT | 357 | 981 |
| 05_12_2_8 | ATAGTYWCWGGACTTTTGGCGGAGGGACCAAG | | | |
| VK1- | CCTGATGATTTTGCAACTTATTACTGCCAGCAGTACV | CAGCAGTACVRMMBCTACWGGACT | 358 | 982 |
| 05_13_2_8 | RMMBCTACWGGACTTTTGGCGGAGGGACCAAG | | | |
| VK1- | CCTGATGATTTTGCAACTTATTACTGCCAGCAGTACV | CAGCAGTACVRMAGTYWCWGGACT | 359 | 983 |
| 05_14_2_8 | RMAGTYWCWGGACTTTTGGCGGAGGGACCAAG | | | |
| VK1- | CCTGATGATTTTGCAACTTATTACTGCCAGCAGTACA | CAGCAGTACAATMBCYWCWGGACT | 360 | 984 |
| 05_15_2_8 | ATMBCYWCWGGACTTTTGGCGGAGGGACCAAG | | | |
| VK1-05_2_2_8 | CCTGATGATTTTGCAACTTATTACTGCSWMCAGBHCA | SWMCAGBHCAATAGTTACWGGACT | 361 | 985 |
| | ATAGTTACWGGACTTTTGGCGGAGGGACCAAG | | | |
| VK1-05_3_2_8 | CCTGATGATTTTGCAACTTATTACTGCSWMCAGTACV | SWMCAGTACVRMAGTTACWGGACT | 362 | 986 |
| | RMAGTTACWGGACTTTTGGCGGAGGGACCAAG | | | |
| VK1-05_4_2_8 | CCTGATGATTTTGCAACTTATTACTGCSWMCAGTACA | SWMCAGTACAATMBCTACWGGACT | 363 | 987 |
| | ATMBCTACWGGACTTTTGGCGGAGGGACCAAG | | | |
| VK1-05_5_2_8 | CCTGATGATTTTGCAACTTATTACTGCSWMCAGTACA | SWMCAGTACAATAGTYWCWGGACT | 364 | 988 |
| | ATAGTYWCWGGACTTTTGGCGGAGGGACCAAG | | | |
| VK1-05_6_2_8 | CCTGATGATTTTGCAACTTATTACTGCCAGSWMBHCA | CAGSWMBHCAATAGTTACWGGACT | 365 | 989 |
| | ATAGTTACWGGACTTTTGGCGGAGGGACCAAG | | | |
| VK1-05_7_2_8 | CCTGATGATTTTGCAACTTATTACTGCCAGSWMTACV | CAGSWMTACVRMAGTTACWGGACT | 366 | 990 |
| | RMAGTTACWGGACTTTTGGCGGAGGGACCAAG | | | |
| VK1-05_8_2_8 | CCTGATGATTTTGCAACTTATTACTGCCAGSWMTACA | CAGSWMTACAATMBCTACWGGACT | 367 | 991 |
| | ATMBCTACWGGACTTTTGGCGGAGGGACCAAG | | | |
| VK1-05_9_2_8 | CCTGATGATTTTGCAACTTATTACTGCCAGSWMTACA | CAGSWMTACAATAGTYWCWGGACT | 368 | 992 |
| | ATAGTYWCWGGACTTTTGGCGGAGGGACCAAG | | | |
| VK1-05_1_3_8 | CCTGATGATTTTGCAACTTATTACTGCSWMSWMTACA | SWMSWMTACAATAGTTACCCTACT | 369 | 993 |
| | ATAGTTACCCTACTTTTGGCGGAGGGACCAAG | | | |
| VK1- | CCTGATGATTTTGCAACTTATTACTGCCAGCAGBHCV | CAGCAGBHCVRMAGTTACCCTACT | 370 | 994 |
| 05_10_3_8 | RMAGTTACCCTACTTTTGGCGGAGGGACCAAG | | | |
| VK1- | CCTGATGATTTTGCAACTTATTACTGCCAGCAGBHCA | CAGCAGBHCAATMBCTACCCTACT | 371 | 995 |
| 05_11_3_8 | ATMBCTACCCTACTTTTGGCGGAGGGACCAAG | | | |
| VK1- | CCTGATGATTTTGCAACTTATTACTGCCAGCAGBHCA | CAGCAGBHCAATAGTYWCCCTACT | 372 | 996 |
| 05_12_3_8 | ATAGTYWCCCTACTTTTGGCGGAGGGACCAAG | | | |
| VK1- | CCTGATGATTTTGCAACTTATTACTGCCAGCAGTACV | CAGCAGTACVRMMBCTACCCTACT | 373 | 997 |
| 05_13_3_8 | RMMBCTACCCTACTTTTGGCGGAGGGACCAAG | | | |
| VK1- | CCTGATGATTTTGCAACTTATTACTGCCAGCAGTACV | CAGCAGTACVRMAGTYWCCCTACT | 374 | 998 |
| 05_14_3_8 | RMAGTYWCCCTACTTTTGGCGGAGGGACCAAG | | | |
| VK1- | CCTGATGATTTTGCAACTTATTACTGCCAGCAGTACA | CAGCAGTACAATMBCYWCCCTACT | 375 | 999 |
| 05_15_3_8 | ATMBCYWCCCTACTTTTGGCGGAGGGACCAAG | | | |
| VK1-05_2_3_8 | CCTGATGATTTTGCAACTTATTACTGCSWMCAGBHCA | SWMCAGBHCAATAGTTACCCTACT | 376 | 1000 |
| | ATAGTTACCCTACTTTTGGCGGAGGGACCAAG | | | |
| VK1-05_3_3_8 | CCTGATGATTTTGCAACTTATTACTGCSWMCAGTACV | SWMCAGTACVRMAGTTACCCTACT | 377 | 1001 |
| | RMAGTTACCCTACTTTTGGCGGAGGGACCAAG | | | |
| VK1-05_4_3_8 | CCTGATGATTTTGCAACTTATTACTGCSWMCAGTACA | SWMCAGTACAATMBCTACCCTACT | 378 | 1002 |
| | ATMBCTACCCTACTTTTGGCGGAGGGACCAAG | | | |
| VK1-05_5_3_8 | CCTGATGATTTTGCAACTTATTACTGCSWMCAGTACA | SWMCAGTACAATAGTYWCCCTACT | 379 | 1003 |
| | ATAGTYWCCCTACTTTTGGCGGAGGGACCAAG | | | |
| VK1-05_6_3_8 | CCTGATGATTTTGCAACTTATTACTGCCAGSWMBHCA | CAGSWMBHCAATAGTTACCCTACT | 380 | 1004 |
| | ATAGTTACCCTACTTTTGGCGGAGGGACCAAG | | | |
| VK1-05_7_3_8 | CCTGATGATTTTGCAACTTATTACTGCCAGSWMTACV | CAGSWMTACVRMAGTTACCCTACT | 381 | 1005 |
| | RMAGTTACCCTACTTTTGGCGGAGGGACCAAG | | | |
| VK1-05_8_3_8 | CCTGATGATTTTGCAACTTATTACTGCCAGSWMTACA | CAGSWMTACAATMBCTACCCTACT | 382 | 1006 |
| | ATMBCTACCCTACTTTTGGCGGAGGGACCAAG | | | |
| VK1-05_9_3_8 | CCTGATGATTTTGCAACTTATTACTGCCAGSWMTACA | CAGSWMTACAATAGTYWCCCTACT | 383 | 1007 |
| | ATAGTYWCCCTACTTTTGGCGGAGGGACCAAG | | | |
| VK1-12_1_0_8 | CCTGAAGATTTTGCAACTTATTACTGTSWMSWMGCAA | SWMSWMGCAAATAGTTTCTWCACT | 384 | 1008 |
| | ATAGTTTCTWCACTTTTGGCGGAGGGACCAAG | | | |
| VK1- | CCTGAAGATTTTGCAACTTATTACTGTCAGCAGRNAN | CAGCAGRNANHCAGTTTCTWCACT | 385 | 1009 |
| 12_10_0_8 | HCAGTTTCTWCACTTTTGGCGGAGGGACCAAG | | | |
| VK1- | CCTGAAGATTTTGCAACTTATTACTGTCAGCAGRNAA | CAGCAGRNAAATNHCTTCTWCACT | 386 | 1010 |
| 12_11_0_8 | ATNHCTTCTWCACTTTTGGCGGAGGGACCAAG | | | |
| VK1- | CCTGAAGATTTTGCAACTTATTACTGTCAGCAGRNAA | CAGCAGRNAAATAGTYWCTWCACT | 387 | 1011 |
| 12_12_0_8 | ATAGTYWCTWCACTTTTGGCGGAGGGACCAAG | | | |
| VK1- | CCTGAAGATTTTGCAACTTATTACTGTCAGCAGGCAN | CAGCAGGCANHCNHCTTCTWCACT | 388 | 1012 |
| 12_13_0_8 | HCNHCTTCTWCACTTTTGGCGGAGGGACCAAG | | | |
| VK1- | CCTGAAGATTTTGCAACTTATTACTGTCAGCAGGCAN | CAGCAGGCANHCAGTYWCTWCACT | 389 | 1013 |
| 12_14_0_8 | HCAGTYWCTWCACTTTTGGCGGAGGGACCAAG | | | |
| VK1- | CCTGAAGATTTTGCAACTTATTACTGTCAGCAGGCAA | CAGCAGGCAAATNHCYWCTWCACT | 390 | 1014 |
| 12_15_0_8 | ATNHCYWCTWCACTTTTGGCGGAGGGACCAAG | | | |
| VK1-12_2_0_8 | CCTGAAGATTTTGCAACTTATTACTGTSWMCAGRNAA | SWMCAGRNAAATAGTTTCTWCACT | 391 | 1015 |
| | ATAGTTTCTWCACTTTTGGCGGAGGGACCAAG | | | |
| VK1-12_3_0_8 | CCTGAAGATTTTGCAACTTATTACTGTSWMCAGGCAN | SWMCAGGCANHCAGTTTCTWCACT | 392 | 1016 |
| | HCAGTTTCTWCACTTTTGGCGGAGGGACCAAG | | | |
| VK1-12_4_0_8 | CCTGAAGATTTTGCAACTTATTACTGTSWMCAGGCAA | SWMCAGGCAAATNHCTTCTWCACT | 393 | 1017 |
| | ATNHCTTCTWCACTTTTGGCGGAGGGACCAAG | | | |
| VK1-12_5_0_8 | CCTGAAGATTTTGCAACTTATTACTGTSWMCAGGCAA | SWMCAGGCAAATAGTYWCTWCACT | 394 | 1018 |
| | ATAGTYWCTWCACTTTTGGCGGAGGGACCAAG | | | |
| VK1-12_6_0_8 | CCTGAAGATTTTGCAACTTATTACTGTCAGSWMRNAA | CAGSWMRNAAATAGTTTCTWCACT | 395 | 1019 |
| | ATAGTTTCTWCACTTTTGGCGGAGGGACCAAG | | | |
| VK1-12_7_0_8 | CCTGAAGATTTTGCAACTTATTACTGTCAGSWMGCAN | CAGSWMGCANHCAGTTTCTWCACT | 396 | 1020 |
| | HCAGTTTCTWCACTTTTGGCGGAGGGACCAAG | | | |
| VK1-12_8_0_8 | CCTGAAGATTTTGCAACTTATTACTGTCAGSWMGCAA | CAGSWMGCAAATNHCTTCTWCACT | 397 | 1021 |
| | ATNHCTTCTWCACTTTTGGCGGAGGGACCAAG | | | |
| VK1-12_9_0_8 | CCTGAAGATTTTGCAACTTATTACTGTCAGSWMGCAA | CAGSWMGCAAATAGTYWCTWCACT | 398 | 1022 |
| | ATAGTYWCTWCACTTTTGGCGGAGGGACCAAG | | | |
| VK1-12_1_1_8 | CCTGAAGATTTTGCAACTTATTACTGTSWMSWMGCAA | SWMSWMGCAAATAGTTTCMTCACT | 399 | 1023 |
| | ATAGTTTCMTCACTTTTGGCGGAGGGACCAAG | | | |
| VK1- | CCTGAAGATTTTGCAACTTATTACTGTCAGCAGRNAN | CAGCAGRNANHCAGTTTCMTCACT | 400 | 1024 |
| 12_10_1_8 | HCAGTTTCMTCACTTTTGGCGGAGGGACCAAG | | | |
| VK1- | CCTGAAGATTTTGCAACTTATTACTGTCAGCAGRNAA | CAGCAGRNAAATNHCTTCMTCACT | 401 | 1025 |
| 12_11_1_8 | ATNHCTTCMTCACTTTTGGCGGAGGGACCAAG | | | |
| VK1- | CCTGAAGATTTTGCAACTTATTACTGTCAGCAGRNAA | CAGCAGRNAAATAGTYWCMTCACT | 402 | 1026 |
| 12_12_1_8 | ATAGTYWCMTCACTTTTGGCGGAGGGACCAAG | | | |
| VK1- | CCTGAAGATTTTGCAACTTATTACTGTCAGCAGGCAN | CAGCAGGCANHCNHCTTCMTCACT | 403 | 1027 |
| 12_13_1_8 | HCNHCTTCMTCACTTTTGGCGGAGGGACCAAG | | | |
| VK1- | CCTGAAGATTTTGCAACTTATTACTGTCAGCAGGCAN | CAGCAGGCANHCAGTYWCMTCACT | 404 | 1028 |
| 12_14_1_8 | HCAGTYWCMTCACTTTTGGCGGAGGGACCAAG | | | |
| VK1- | CCTGAAGATTTTGCAACTTATTACTGTCAGCAGGCAA | CAGCAGGCAAATNHCYWCMTCACT | 405 | 1029 |
| 12_15_1_8 | ATNHCYWCMTCACTTTTGGCGGAGGGACCAAG | | | |
| VK1-12_2_1_8 | CCTGAAGATTTTGCAACTTATTACTGTSWMCAGRNAA | SWMCAGRNAAATAGTTTCMTCACT | 406 | 1030 |
| | ATAGTTTCMTCACTTTTGGCGGAGGGACCAAG | | | |
| VK1-12_3_1_8 | CCTGAAGATTTTGCAACTTATTACTGTSWMCAGGCAN | SWMCAGGCANHCAGTTTCMTCACT | 407 | 1031 |
| | HCAGTTTCMTCACTTTTGGCGGAGGGACCAAG | | | |
| VK1-12_4_1_8 | CCTGAAGATTTTGCAACTTATTACTGTSWMCAGGCAA | SWMCAGGCAAATNHCTTCMTCACT | 408 | 1032 |
| | ATNHCTTCMTCACTTTTGGCGGAGGGACCAAG | | | |
| VK1-12_5_1_8 | CCTGAAGATTTTGCAACTTATTACTGTSWMCAGGCAA | SWMCAGGCAAATAGTYWCMTCACT | 409 | 1033 |
| | ATAGTYWCMTCACTTTTGGCGGAGGGACCAAG | | | |
| VK1-12_6_1_8 | CCTGAAGATTTTGCAACTTATTACTGTCAGSWMRNAA | CAGSWMRNAAATAGTTTCMTCACT | 410 | 1034 |
| | ATAGTTTCMTCACTTTTGGCGGAGGGACCAAG | | | |
| VK1-12_7_1_8 | CCTGAAGATTTTGCAACTTATTACTGTCAGSWMGCAN | CAGSWMGCANHCAGTTTCMTCACT | 411 | 1035 |
| | HCAGTTTCMTCACTTTTGGCGGAGGGACCAAG | | | |
| VK1-12_8_1_8 | CCTGAAGATTTTGCAACTTATTACTGTCAGSWMGCAA | CAGSWMGCAAATNHCTTCMTCACT | 412 | 1036 |
| | ATNHCTTCMTCACTTTTGGCGGAGGGACCAAG | | | |
| VK1-12_9_1_8 | CCTGAAGATTTTGCAACTTATTACTGTCAGSWMGCAA | CAGSWMGCAAATAGTYWCMTCACT | 413 | 1037 |
| | ATAGTYWCMTCACTTTTGGCGGAGGGACCAAG | | | |
| VK1-12_1_2_8 | CCTGAAGATTTTGCAACTTATTACTGTSWMSWMGCAA | SWMSWMGCAAATAGTTTCWGGACT | 414 | 1038 |
| | ATAGTTTCWGGACTTTTGGCGGAGGGACCAAG | | | |
| VK1- | CCTGAAGATTTTGCAACTTATTACTGTCAGCAGRNAN | CAGCAGRNANHCAGTTTCWGGACT | 415 | 1039 |
| 12_10_2_8 | HCAGTTTCWGGACTTTTGGCGGAGGGACCAAG | | | |
| VK1- | CCTGAAGATTTTGCAACTTATTACTGTCAGCAGRNAA | CAGCAGRNAAATNHCTTCWGGACT | 416 | 1040 |
| 12_11_2_8 | ATNHCTTCWGGACTTTTGGCGGAGGGACCAAG | | | |
| VK1- | CCTGAAGATTTTGCAACTTATTACTGTCAGCAGRNAA | CAGCAGRNAAATAGTYWCWGGACT | 417 | 1041 |
| 12_12_2_8 | ATAGTYWCWGGACTTTTGGCGGAGGGACCAAG | | | |
| VK1- | CCTGAAGATTTTGCAACTTATTACTGTCAGCAGGCAN | CAGCAGGCANHCNHCTTCWGGACT | 418 | 1042 |
| 12_13_2_8 | HCNHCTTCWGGACTTTTGGCGGAGGGACCAAG | | | |
| VK1- | CCTGAAGATTTTGCAACTTATTACTGTCAGCAGGCAN | CAGCAGGCANHCAGTYWCWGGACT | 419 | 1043 |
| 12_14_2_8 | HCAGTYWCWGGACTTTTGGCGGAGGGACCAAG | | | |
| VK1- | CCTGAAGATTTTGCAACTTATTACTGTCAGCAGGCAA | CAGCAGGCAAATNHCYWCWGGACT | 420 | 1044 |
| 12_15_2_8 | ATNHCYWCWGGACTTTTGGCGGAGGGACCAAG | | | |
| VK1-12_2_2_8 | CCTGAAGATTTTGCAACTTATTACTGTSWMCAGRNAA | SWMCAGRNAAATAGTTTCWGGACT | 421 | 1045 |
| | ATAGTTTCWGGACTTTTGGCGGAGGGACCAAG | | | |
| VK1-12_3_2_8 | CCTGAAGATTTTGCAACTTATTACTGTSWMCAGGCAN | SWMCAGGCANHCAGTTTCWGGACT | 422 | 1046 |
| | HCAGTTTCWGGACTTTTGGCGGAGGGACCAAG | | | |
| VK1-12_4_2_8 | CCTGAAGATTTTGCAACTTATTACTGTSWMCAGGCAA | SWMCAGGCAAATNHCTTCWGGACT | 423 | 1047 |
| | ATNHCTTCWGGACTTTTGGCGGAGGGACCAAG | | | |
| VK1-12_5_2_8 | CCTGAAGATTTTGCAACTTATTACTGTSWMCAGGCAA | SWMCAGGCAAATAGTYWCWGGACT | 424 | 1048 |
| | ATAGTYWCWGGACTTTTGGCGGAGGGACCAAG | | | |
| VK1-12_6_2_8 | CCTGAAGATTTTGCAACTTATTACTGTCAGSWMRNAA | CAGSWMRNAAATAGTTTCWGGACT | 425 | 1049 |
| | ATAGTTTCWGGACTTTTGGCGGAGGGACCAAG | | | |
| VK1-12_7_2_8 | CCTGAAGATTTTGCAACTTATTACTGTCAGSWMGCAN | CAGSWMGCANHCAGTTTCWGGACT | 426 | 1050 |
| | HCAGTTTCWGGACTTTTGGCGGAGGGACCAAG | | | |
| VK1-12_8_2_8 | CCTGAAGATTTTGCAACTTATTACTGTCAGSWMGCAA | CAGSWMGCAAATNHCTTCWGGACT | 427 | 1051 |
| | ATNHCTTCWGGACTTTTGGCGGAGGGACCAAG | | | |
| VK1-12_9_2_8 | CCTGAAGATTTTGCAACTTATTACTGTCAGSWMGCAA | CAGSWMGCAAATAGTYWCWGGACT | 428 | 1052 |
| | ATAGTYWCWGGACTTTTGGCGGAGGGACCAAG | | | |
| VK1-12_1_3_8 | CCTGAAGATTTTGCAACTTATTACTGTSWMSWMGCAA | SWMSWMGCAAATAGTTTCCCTACT | 429 | 1053 |
| | ATAGTTTCCCTACTTTTGGCGGAGGGACCAAG | | | |
| VK1- | CCTGAAGATTTTGCAACTTATTACTGTCAGCAGRNAN | CAGCAGRNANHCAGTTTCCCTACT | 430 | 1054 |
| 12_10_3_8 | HCAGTTTCCCTACTTTTGGCGGAGGGACCAAG | | | |
| VK1- | CCTGAAGATTTTGCAACTTATTACTGTCAGCAGRNAA | CAGCAGRNAAATNHCTTCCCTACT | 431 | 1055 |
| 12_11_3_8 | ATNHCTTCCCTACTTTTGGCGGAGGGACCAAG | | | |
| VK1- | CCTGAAGATTTTGCAACTTATTACTGTCAGCAGRNAA | CAGCAGRNAAATAGTYWCCCTACT | 432 | 1056 |
| 12_12_3_8 | ATAGTYWCCCTACTTTTGGCGGAGGGACCAAG | | | |
| VK1- | CCTGAAGATTTTGCAACTTATTACTGTCAGCAGGCAN | CAGCAGGCANHCNHCTTCCCTACT | 433 | 1057 |
| 12_13_3_8 | HCNHCTTCCCTACTTTTGGCGGAGGGACCAAG | | | |
| VK1- | CCTGAAGATTTTGCAACTTATTACTGTCAGCAGGCAN | CAGCAGGCANHCAGTYWCCCTACT | 434 | 1058 |
| 12_14_3_8 | HCAGTYWCCCTACTTTTGGCGGAGGGACCAAG | | | |
| VK1- | CCTGAAGATTTTGCAACTTATTACTGTCAGCAGGCAA | CAGCAGGCAAATNHCYWCCCTACT | 435 | 1059 |
| 12_15_3_8 | ATNHCYWCCCTACTTTTGGCGGAGGGACCAAG | | | |
| VK1-12_2_3_8 | CCTGAAGATTTTGCAACTTATTACTGTSWMCAGRNAA | SWMCAGRNAAATAGTTTCCCTACT | 436 | 1060 |
| | ATAGTTTCCCTACTTTTGGCGGAGGGACCAAG | | | |
| VK1-12_3_3_8 | CCTGAAGATTTTGCAACTTATTACTGTSWMCAGGCAN | SWMCAGGCANHCAGTTTCCCTACT | 437 | 1061 |
| | HCAGTTTCCCTACTTTTGGCGGAGGGACCAAG | | | |
| VK1-12_4_3_8 | CCTGAAGATTTTGCAACTTATTACTGTSWMCAGGCAA | SWMCAGGCAAATNHCTTCCCTACT | 438 | 1062 |
| | ATNHCTTCCCTACTTTTGGCGGAGGGACCAAG | | | |
| VK1-12_5_3_8 | CCTGAAGATTTTGCAACTTATTACTGTSWMCAGGCAA | SWMCAGGCAAATAGTYWCCCTACT | 439 | 1063 |
| | ATAGTYWCCCTACTTTTGGCGGAGGGACCAAG | | | |
| VK1-12_6_3_8 | CCTGAAGATTTTGCAACTTATTACTGTCAGSWMRNAA | CAGSWMRNAAATAGTTTCCCTACT | 440 | 1064 |
| | ATAGTTTCCCTACTTTTGGCGGAGGGACCAAG | | | |
| VK1-12_7_3_8 | CCTGAAGATTTTGCAACTTATTACTGTCAGSWMGCAN | CAGSWMGCANHCAGTTTCCCTACT | 441 | 1065 |
| | HCAGTTTCCCTACTTTTGGCGGAGGGACCAAG | | | |
| VK1-12_8_3_8 | CCTGAAGATTTTGCAACTTATTACTGTCAGSWMGCAA | CAGSWMGCAAATNHCTTCCCTACT | 442 | 1066 |
| | ATNHCTTCCCTACTTTTGGCGGAGGGACCAAG | | | |
| VK1-12_9_3_8 | CCTGAAGATTTTGCAACTTATTACTGTCAGSWMGCAA | CAGSWMGCAAATAGTYWCCCTACT | 443 | 1067 |
| | ATAGTYWCCCTACTTTTGGCGGAGGGACCAAG | | | |
| VK1-33_1_0_8 | CCTGAAGATATTGCAACATATTACTGTSWMSWMTACG | SWMSWMTACGATAATCTCTWCACT | 444 | 1068 |
| | ATAATCTCTWCACTTTTGGCGGAGGGACCAAG | | | |
| VK1- | CCTGAAGATATTGCAACATATTACTGTCAGCAGBHCN | CAGCAGBHCNHCAATCTCTWCACT | 445 | 1069 |
| 33_10_0_8 | HCAATCTCTWCACTTTTGGCGGAGGGACCAAG | | | |
| VK1- | CCTGAAGATATTGCAACATATTACTGTCAGCAGBHCG | CAGCAGBHCGATNHCCTCTWCACT | 446 | 1070 |
| 33_11_0_8 | ATNHCCTCTWCACTTTTGGCGGAGGGACCAAG | | | |
| VK1- | CCTGAAGATATTGCAACATATTACTGTCAGCAGBHCG | CAGCAGBHCGATAATYWCTWCACT | 447 | 1071 |
| 33_12_0_8 | ATAATYWCTWCACTTTTGGCGGAGGGACCAAG | | | |
| VK1- | CCTGAAGATATTGCAACATATTACTGTCAGCAGTACN | CAGCAGTACNHCNHCCTCTWCACT | 448 | 1072 |
| 33_13_0_8 | HCNHCCTCTWCACTTTTGGCGGAGGGACCAAG | | | |
| VK1- | CCTGAAGATATTGCAACATATTACTGTCAGCAGTACN | CAGCAGTACNHCAATYWCTWCACT | 449 | 1073 |
| 33_14_0_8 | HCAATYWCTWCACTTTTGGCGGAGGGACCAAG | | | |
| VK1- | CCTGAAGATATTGCAACATATTACTGTCAGCAGTACG | CAGCAGTACGATNHCYWCTWCACT | 450 | 1074 |
| 33_15_0_8 | ATNHCYWCTWCACTTTTGGCGGAGGGACCAAG | | | |
| VK1-33_2_0_8 | CCTGAAGATATTGCAACATATTACTGTSWMCAGBHCG | SWMCAGBHCGATAATCTCTWCACT | 451 | 1075 |
| | ATAATCTCTWCACTTTTGGCGGAGGGACCAAG | | | |
| VK1-33_3_0_8 | CCTGAAGATATTGCAACATATTACTGTSWMCAGTACN | SWMCAGTACNHCAATCTCTWCACT | 452 | 1076 |
| | HCAATCTCTWCACTTTTGGCGGAGGGACCAAG | | | |
| VK1-33_4_0_8 | CCTGAAGATATTGCAACATATTACTGTSWMCAGTACG | SWMCAGTACGATNHCCTCTWCACT | 453 | 1077 |
| | ATNHCCTCTWCACTTTTGGCGGAGGGACCAAG | | | |
| VK1-33_5_0_8 | CCTGAAGATATTGCAACATATTACTGTSWMCAGTACG | SWMCAGTACGATAATYWCTWCACT | 454 | 1078 |
| | ATAATYWCTWCACTTTTGGCGGAGGGACCAAG | | | |
| VK1-33_6_0_8 | CCTGAAGATATTGCAACATATTACTGTCAGSWMBHCG | CAGSWMBHCGATAATCTCTWCACT | 455 | 1079 |
| | ATAATCTCTWCACTTTTGGCGGAGGGACCAAG | | | |
| VK1-33_7_0_8 | CCTGAAGATATTGCAACATATTACTGTCAGSWMTACN | CAGSWMTACNHCAATCTCTWCACT | 456 | 1080 |
| | HCAATCTCTWCACTTTTGGCGGAGGGACCAAG | | | |
| VK1-33_8_0_8 | CCTGAAGATATTGCAACATATTACTGTCAGSWMTACG | CAGSWMTACGATNHCCTCTWCACT | 457 | 1081 |
| | ATNHCCTCTWCACTTTTGGCGGAGGGACCAAG | | | |
| VK1-33_9_0_8 | CCTGAAGATATTGCAACATATTACTGTCAGSWMTACG | CAGSWMTACGATAATYWCTWCACT | 458 | 1082 |
| | ATAATYWCTWCACTTTTGGCGGAGGGACCAAG | | | |
| VK1-33_1_1_8 | CCTGAAGATATTGCAACATATTACTGTSWMSWMTACG | SWMSWMTACGATAATCTCMTCACT | 459 | 1083 |
| | ATAATCTCMTCACTTTTGGCGGAGGGACCAAG | | | |
| VK1- | CCTGAAGATATTGCAACATATTACTGTCAGCAGBHCN | CAGCAGBHCNHCAATCTCMTCACT | 460 | 1084 |
| 33_10_1_8 | HCAATCTCMTCACTTTTGGCGGAGGGACCAAG | | | |
| VK1- | CCTGAAGATATTGCAACATATTACTGTCAGCAGBHCG | CAGCAGBHCGATNHCCTCMTCACT | 461 | 1085 |
| 33_11_1_8 | ATNHCCTCMTCACTTTTGGCGGAGGGACCAAG | | | |
| VK1- | CCTGAAGATATTGCAACATATTACTGTCAGCAGBHCG | CAGCAGBHCGATAATYWCMTCACT | 462 | 1086 |
| 33_12_1_8 | ATAATYWCMTCACTTTTGGCGGAGGGACCAAG | | | |
| VK1- | CCTGAAGATATTGCAACATATTACTGTCAGCAGTACN | CAGCAGTACNHCNHCCTCMTCACT | 463 | 1087 |
| 33_13_1_8 | HCNHCCTCMTCACTTTTGGCGGAGGGACCAAG | | | |
| VK1- | CCTGAAGATATTGCAACATATTACTGTCAGCAGTACN | CAGCAGTACNHCAATYWCMTCACT | 464 | 1088 |
| 33_14_1_8 | HCAATYWCMTCACTTTTGGCGGAGGGACCAAG | | | |
| VK1- | CCTGAAGATATTGCAACATATTACTGTCAGCAGTACG | CAGCAGTACGATNHCYWCMTCACT | 465 | 1089 |
| 33_15_1_8 | ATNHCYWCMTCACTTTTGGCGGAGGGACCAAG | | | |
| VK1-33_2_1_8 | CCTGAAGATATTGCAACATATTACTGTSWMCAGBHCG | SWMCAGBHCGATAATCTCMTCACT | 466 | 1090 |
| | ATAATCTCMTCACTTTTGGCGGAGGGACCAAG | | | |
| VK1-33_3_1_8 | CCTGAAGATATTGCAACATATTACTGTSWMCAGTACN | SWMCAGTACNHCAATCTCMTCACT | 467 | 1091 |
| | HCAATCTCMTCACTTTTGGCGGAGGGACCAAG | | | |
| VK1-33_4_1_8 | CCTGAAGATATTGCAACATATTACTGTSWMCAGTACG | SWMCAGTACGATNHCCTCMTCACT | 468 | 1092 |
| | ATNHCCTCMTCACTTTTGGCGGAGGGACCAAG | | | |
| VK1-33_5_1_8 | CCTGAAGATATTGCAACATATTACTGTSWMCAGTACG | SWMCAGTACGATAATYWCMTCACT | 469 | 1093 |
| | ATAATYWCMTCACTTTTGGCGGAGGGACCAAG | | | |
| VK1-33_6_1_8 | CCTGAAGATATTGCAACATATTACTGTCAGSWMBHCG | CAGSWMBHCGATAATCTCMTCACT | 470 | 1094 |
| | ATAATCTCMTCACTTTTGGCGGAGGGACCAAG | | | |
| VK1-33_7_1_8 | CCTGAAGATATTGCAACATATTACTGTCAGSWMTACN | CAGSWMTACNHCAATCTCMTCACT | 471 | 1095 |
| | HCAATCTCMTCACTTTTGGCGGAGGGACCAAG | | | |
| VK1-33_8_1_8 | CCTGAAGATATTGCAACATATTACTGTCAGSWMTACG | CAGSWMTACGATNHCCTCMTCACT | 472 | 1096 |
| | ATNHCCTCMTCACTTTTGGCGGAGGGACCAAG | | | |
| VK1-33_9_1_8 | CCTGAAGATATTGCAACATATTACTGTCAGSWMTACG | CAGSWMTACGATAATYWCMTCACT | 473 | 1097 |
| | ATAATYWCMTCACTTTTGGCGGAGGGACCAAG | | | |
| VK1-33_1_2_8 | CCTGAAGATATTGCAACATATTACTGTSWMSWMTACG | SWMSWMTACGATAATCTCWGGACT | 474 | 1098 |
| | ATAATCTCWGGACTTTTGGCGGAGGGACCAAG | | | |
| VK1- | CCTGAAGATATTGCAACATATTACTGTCAGCAGBHCN | CAGCAGBHCNHCAATCTCWGGACT | 475 | 1099 |
| 33_10_2_8 | HCAATCTCWGGACTTTTGGCGGAGGGACCAAG | | | |
| VK1- | CCTGAAGATATTGCAACATATTACTGTCAGCAGBHCG | CAGCAGBHCGATNHCCTCWGGACT | 476 | 1100 |
| 33_11_2_8 | ATNHCCTCWGGACTTTTGGCGGAGGGACCAAG | | | |
| VK1- | CCTGAAGATATTGCAACATATTACTGTCAGCAGBHCG | CAGCAGBHCGATAATYWCWGGACT | 477 | 1101 |
| 33_12_2_8 | ATAATYWCWGGACTTTTGGCGGAGGGACCAAG | | | |
| VK1- | CCTGAAGATATTGCAACATATTACTGTCAGCAGTACN | CAGCAGTACNHCNHCCTCWGGACT | 478 | 1102 |
| 33_13_2_8 | HCNHCCTCWGGACTTTTGGCGGAGGGACCAAG | | | |
| VK1- | CCTGAAGATATTGCAACATATTACTGTCAGCAGTACN | CAGCAGTACNHCAATYWCWGGACT | 479 | 1103 |
| 33_14_2_8 | HCAATYWCWGGACTTTTGGCGGAGGGACCAAG | | | |
| VK1- | CCTGAAGATATTGCAACATATTACTGTCAGCAGTACG | CAGCAGTACGATNHCYWCWGGACT | 480 | 1104 |
| 33_15_2_8 | ATNHCYWCWGGACTTTTGGCGGAGGGACCAAG | | | |
| VK1-33_2_2_8 | CCTGAAGATATTGCAACATATTACTGTSWMCAGBHCG | SWMCAGBHCGATAATCTCWGGACT | 481 | 1105 |
| | ATAATCTCWGGACTTTTGGCGGAGGGACCAAG | | | |
| VK1-33_3_2_8 | CCTGAAGATATTGCAACATATTACTGTSWMCAGTACN | SWMCAGTACNHCAATCTCWGGACT | 482 | 1106 |
| | HCAATCTCWGGACTTTTGGCGGAGGGACCAAG | | | |
| VK1-33_4_2_8 | CCTGAAGATATTGCAACATATTACTGTSWMCAGTACG | SWMCAGTACGATNHCCTCWGGACT | 483 | 1107 |
| | ATNHCCTCWGGACTTTTGGCGGAGGGACCAAG | | | |
| VK1-33_5_2_8 | CCTGAAGATATTGCAACATATTACTGTSWMCAGTACG | SWMCAGTACGATAATYWCWGGACT | 484 | 1108 |
| | ATAATYWCWGGACTTTTGGCGGAGGGACCAAG | | | |
| VK1-33_6_2_8 | CCTGAAGATATTGCAACATATTACTGTCAGSWMBHCG | CAGSWMBHCGATAATCTCWGGACT | 485 | 1109 |
| | ATAATCTCWGGACTTTTGGCGGAGGGACCAAG | | | |
| VK1-33_7_2_8 | CCTGAAGATATTGCAACATATTACTGTCAGSWMTACN | CAGSWMTACNHCAATCTCWGGACT | 486 | 1110 |
| | HCAATCTCWGGACTTTTGGCGGAGGGACCAAG | | | |
| VK1-33_8_2_8 | CCTGAAGATATTGCAACATATTACTGTCAGSWMTACG | CAGSWMTACGATNHCCTCWGGACT | 487 | 1111 |
| | ATNHCCTCWGGACTTTTGGCGGAGGGACCAAG | | | |
| VK1-33_9_2_8 | CCTGAAGATATTGCAACATATTACTGTCAGSWMTACG | CAGSWMTACGATAATYWCWGGACT | 488 | 1112 |
| | ATAATYWCWGGACTTTTGGCGGAGGGACCAAG | | | |
| VK1-33_1_3_8 | CCTGAAGATATTGCAACATATTACTGTSWMSWMTACG | SWMSWMTACGATAATCTCCCTACT | 489 | 1113 |
| | ATAATCTCCCTACTTTTGGCGGAGGGACCAAG | | | |
| VK1- | CCTGAAGATATTGCAACATATTACTGTCAGCAGBHCN | CAGCAGBHCNHCAATCTCCCTACT | 490 | 1114 |
| 33_10_3_8 | HCAATCTCCCTACTTTTGGCGGAGGGACCAAG | | | |
| VK1- | CCTGAAGATATTGCAACATATTACTGTCAGCAGBHCG | CAGCAGBHCGATNHCCTCCCTACT | 491 | 1115 |
| 33_11_3_8 | ATNHCCTCCCTACTTTTGGCGGAGGGACCAAG | | | |
| VK1- | CCTGAAGATATTGCAACATATTACTGTCAGCAGBHCG | CAGCAGBHCGATAATYWCCCTACT | 492 | 1116 |
| 33_12_3_8 | ATAATYWCCCTACTTTTGGCGGAGGGACCAAG | | | |
| VK1- | CCTGAAGATATTGCAACATATTACTGTCAGCAGTACN | CAGCAGTACNHCNHCCTCCCTACT | 493 | 1117 |
| 33_13_3_8 | HCNHCCTCCCTACTTTTGGCGGAGGGACCAAG | | | |
| VK1- | CCTGAAGATATTGCAACATATTACTGTCAGCAGTACN | CAGCAGTACNHCAATYWCCCTACT | 494 | 1118 |
| 33_14_3_8 | HCAATYWCCCTACTTTTGGCGGAGGGACCAAG | | | |
| VK1- | CCTGAAGATATTGCAACATATTACTGTCAGCAGTACG | CAGCAGTACGATNHCYWCCCTACT | 495 | 1119 |
| 33_15_3_8 | ATNHCYWCCCTACTTTTGGCGGAGGGACCAAG | | | |
| VK1-33_2_3_8 | CCTGAAGATATTGCAACATATTACTGTSWMCAGBHCG | SWMCAGBHCGATAATCTCCCTACT | 496 | 1120 |
| | ATAATCTCCCTACTTTTGGCGGAGGGACCAAG | | | |
| VK1-33_3_3_8 | CCTGAAGATATTGCAACATATTACTGTSWMCAGTACN | SWMCAGTACNHCAATCTCCCTACT | 497 | 1121 |
| | HCAATCTCCCTACTTTTGGCGGAGGGACCAAG | | | |
| VK1-33_4_3_8 | CCTGAAGATATTGCAACATATTACTGTSWMCAGTACG | SWMCAGTACGATNHCCTCCCTACT | 498 | 1122 |
| | ATNHCCTCCCTACTTTTGGCGGAGGGACCAAG | | | |
| VK1-33_5_3_8 | CCTGAAGATATTGCAACATATTACTGTSWMCAGTACG | SWMCAGTACGATAATYWCCCTACT | 499 | 1123 |
| | ATAATYWCCCTACTTTTGGCGGAGGGACCAAG | | | |
| VK1-33_6_3_8 | CCTGAAGATATTGCAACATATTACTGTCAGSWMBHCG | CAGSWMBHCGATAATCTCCCTACT | 500 | 1124 |
| | ATAATCTCCCTACTTTTGGCGGAGGGACCAAG | | | |
| VK1-33_7_3_8 | CCTGAAGATATTGCAACATATTACTGTCAGSWMTACN | CAGSWMTACNHCAATCTCCCTACT | 501 | 1125 |
| | HCAATCTCCCTACTTTTGGCGGAGGGACCAAG | | | |
| VK1-33_8_3_8 | CCTGAAGATATTGCAACATATTACTGTCAGSWMTACG | CAGSWMTACGATNHCCTCCCTACT | 502 | 1126 |
| | ATNHCCTCCCTACTTTTGGCGGAGGGACCAAG | | | |
| VK1-33_9_3_8 | CCTGAAGATATTGCAACATATTACTGTCAGSWMTACG | CAGSWMTACGATAATYWCCCTACT | 503 | 1127 |
| | ATAATYWCCCTACTTTTGGCGGAGGGACCAAG | | | |
| VK1-39_1_0_8 | CCTGAAGATTTTGCAACTTACTACTGTSWMSWMAGCT | SWMSWMAGCTACAGTACTTWCACT | 504 | 1128 |
| | ACAGTACTTWCACTTTTGGCGGAGGGACCAAG | | | |
| VK1- | CCTGAAGATTTTGCAACTTACTACTGTCAGCAAVNAB | CAGCAAVNABHCAGTACTTWCACT | 505 | 1129 |
| 39_10_0_8 | HCAGTACTTWCACTTTTGGCGGAGGGACCAAG | | | |
| VK1- | CCTGAAGATTTTGCAACTTACTACTGTCAGCAAVNAT | CAGCAAVNATACNHCACTTWCACT | 506 | 1130 |
| 39_11_0_8 | ACNHCACTTWCACTTTTGGCGGAGGGACCAAG | | | |
| VK1- | CCTGAAGATTTTGCAACTTACTACTGTCAGCAAVNAT | CAGCAAVNATACAGTBHCTWCACT | 507 | 1131 |
| 39_12_0_8 | ACAGTBHCTWCACTTTTGGCGGAGGGACCAAG | | | |
| VK1- | CCTGAAGATTTTGCAACTTACTACTGTCAGCAAAGCB | CAGCAAAGCBHCNHCACTTWCACT | 508 | 1132 |
| 39_13_0_8 | HCNHCACTTWCACTTTTGGCGGAGGGACCAAG | | | |
| VK1- | CCTGAAGATTTTGCAACTTACTACTGTCAGCAAAGCB | CAGCAAAGCBHCAGTBHCTWCACT | 509 | 1133 |
| 39_14_0_8 | HCAGTBHCTWCACTTTTGGCGGAGGGACCAAG | | | |
| VK1- | CCTGAAGATTTTGCAACTTACTACTGTCAGCAAAGCT | CAGCAAAGCTACNHCBHCTWCACT | 510 | 1134 |
| 39_15_0_8 | ACNHCBHCTWCACTTTTGGCGGAGGGACCAAG | | | |
| VK1-39_2_0_8 | CCTGAAGATTTTGCAACTTACTACTGTSWMCAAVNAT | SWMCAAVNATACAGTACTTWCACT | 511 | 1135 |
| | ACAGTACTTWCACTTTTGGCGGAGGGACCAAG | | | |
| VK1-39_3_0_8 | CCTGAAGATTTTGCAACTTACTACTGTSWMCAAAGCB | SWMCAAAGCBHCAGTACTTWCACT | 512 | 1136 |
| | HCAGTACTTWCACTTTTGGCGGAGGGACCAAG | | | |
| VK1-39_4_0_8 | CCTGAAGATTTTGCAACTTACTACTGTSWMCAAAGCT | SWMCAAAGCTACNHCACTTWCACT | 513 | 1137 |
| | ACNHCACTTWCACTTTTGGCGGAGGGACCAAG | | | |
| VK1-39_5_0_8 | CCTGAAGATTTTGCAACTTACTACTGTSWMCAAAGCT | SWMCAAAGCTACAGTBHCTWCACT | 514 | 1138 |
| | ACAGTBHCTWCACTTTTGGCGGAGGGACCAAG | | | |
| VK1-39_6_0_8 | CCTGAAGATTTTGCAACTTACTACTGTCAGSWMVNAT | CAGSWMVNATACAGTACTTWCACT | 515 | 1139 |
| | ACAGTACTTWCACTTTTGGCGGAGGGACCAAG | | | |
| VK1-39_7_0_8 | CCTGAAGATTTTGCAACTTACTACTGTCAGSWMAGCB | CAGSWMAGCBHCAGTACTTWCACT | 516 | 1140 |
| | HCAGTACTTWCACTTTTGGCGGAGGGACCAAG | | | |
| VK1-39_8_0_8 | CCTGAAGATTTTGCAACTTACTACTGTCAGSWMAGCT | CAGSWMAGCTACNHCACTTWCACT | 517 | 1141 |
| | ACNHCACTTWCACTTTTGGCGGAGGGACCAAG | | | |
| VK1-39_9_0_8 | CCTGAAGATTTTGCAACTTACTACTGTCAGSWMAGCT | CAGSWMAGCTACAGTBHCTWCACT | 518 | 1142 |
| | ACAGTBHCTWCACTTTTGGCGGAGGGACCAAG | | | |
| VK1-39_1_1_8 | CCTGAAGATTTTGCAACTTACTACTGTSWMSWMAGCT | SWMSWMAGCTACAGTACTMTCACT | 519 | 1143 |
| | ACAGTACTMTCACTTTTGGCGGAGGGACCAAG | | | |
| VK1- | CCTGAAGATTTTGCAACTTACTACTGTCAGCAAVNAB | CAGCAAVNABHCAGTACTMTCACT | 520 | 1144 |
| 39_10_1_8 | HCAGTACTMTCACTTTTGGCGGAGGGACCAAG | | | |
| VK1- | CCTGAAGATTTTGCAACTTACTACTGTCAGCAAVNAT | CAGCAAVNATACNHCACTMTCACT | 521 | 1145 |
| 39_11_1_8 | ACNHCACTMTCACTTTTGGCGGAGGGACCAAG | | | |
| VK1- | CCTGAAGATTTTGCAACTTACTACTGTCAGCAAVNAT | CAGCAAVNATACAGTBHCMTCACT | 522 | 1146 |
| 39_12_1_8 | ACAGTBHCMTCACTTTTGGCGGAGGGACCAAG | | | |
| VK1- | CCTGAAGATTTTGCAACTTACTACTGTCAGCAAAGCB | CAGCAAAGCBHCNHCACTMTCACT | 523 | 1147 |
| 39_13_1_8 | HCNHCACTMTCACTTTTGGCGGAGGGACCAAG | | | |
| VK1- | CCTGAAGATTTTGCAACTTACTACTGTCAGCAAAGCB | CAGCAAAGCBHCAGTBHCMTCACT | 524 | 1148 |
| 39_14_1_8 | HCAGTBHCMTCACTTTTGGCGGAGGGACCAAG | | | |
| VK1- | CCTGAAGATTTTGCAACTTACTACTGTCAGCAAAGCT | CAGCAAAGCTACNHCBHCMTCACT | 525 | 1149 |
| 39_15_1_8 | ACNHCBHCMTCACTTTTGGCGGAGGGACCAAG | | | |
| VK1-39_2_1_8 | CCTGAAGATTTTGCAACTTACTACTGTSWMCAAVNAT | SWMCAAVNATACAGTACTMTCACT | 526 | 1150 |
| | ACAGTACTMTCACTTTTGGCGGAGGGACCAAG | | | |
| VK1-39_3_1_8 | CCTGAAGATTTTGCAACTTACTACTGTSWMCAAAGCB | SWMCAAAGCBHCAGTACTMTCACT | 527 | 1151 |
| | HCAGTACTMTCACTTTTGGCGGAGGGACCAAG | | | |
| VK1-39_4_1_8 | CCTGAAGATTTTGCAACTTACTACTGTSWMCAAAGCT | SWMCAAAGCTACNHCACTMTCACT | 528 | 1152 |
| | ACNHCACTMTCACTTTTGGCGGAGGGACCAAG | | | |
| VK1-39_5_1_8 | CCTGAAGATTTTGCAACTTACTACTGTSWMCAAAGCT | SWMCAAAGCTACAGTBHCMTCACT | 529 | 1153 |
| | ACAGTBHCMTCACTTTTGGCGGAGGGACCAAG | | | |
| VK1-39_6_1_8 | CCTGAAGATTTTGCAACTTACTACTGTCAGSWMVNAT | CAGSWMVNATACAGTACTMTCACT | 530 | 1154 |
| | ACAGTACTMTCACTTTTGGCGGAGGGACCAAG | | | |
| VK1-39_7_1_8 | CCTGAAGATTTTGCAACTTACTACTGTCAGSWMAGCB | CAGSWMAGCBHCAGTACTMTCACT | 531 | 1155 |
| | HCAGTACTMTCACTTTTGGCGGAGGGACCAAG | | | |
| VK1-39_8_1_8 | CCTGAAGATTTTGCAACTTACTACTGTCAGSWMAGCT | CAGSWMAGCTACNHCACTMTCACT | 532 | 1156 |
| | ACNHCACTMTCACTTTTGGCGGAGGGACCAAG | | | |
| VK1-39_9_1_8 | CCTGAAGATTTTGCAACTTACTACTGTCAGSWMAGCT | CAGSWMAGCTACAGTBHCMTCACT | 533 | 1157 |
| | ACAGTBHCMTCACTTTTGGCGGAGGGACCAAG | | | |
| VK1-39_1_2_8 | CCTGAAGATTTTGCAACTTACTACTGTSWMSWMAGCT | SWMSWMAGCTACAGTACTWGGACT | 534 | 1158 |
| | ACAGTACTWGGACTTTTGGCGGAGGGACCAAG | | | |
| VK1- | CCTGAAGATTTTGCAACTTACTACTGTCAGCAAVNAB | CAGCAAVNABHCAGTACTWGGACT | 535 | 1159 |
| 39_10_2_8 | HCAGTACTWGGACTTTTGGCGGAGGGACCAAG | | | |
| VK1- | CCTGAAGATTTTGCAACTTACTACTGTCAGCAAVNAT | CAGCAAVNATACNHCACTWGGACT | 536 | 1160 |
| 39_11_2_8 | ACNHCACTWGGACTTTTGGCGGAGGGACCAAG | | | |
| VK1- | CCTGAAGATTTTGCAACTTACTACTGTCAGCAAVNAT | CAGCAAVNATACAGTBHCWGGACT | 537 | 1161 |
| 39_12_2_8 | ACAGTBHCWGGACTTTTGGCGGAGGGACCAAG | | | |
| VK1- | CCTGAAGATTTTGCAACTTACTACTGTCAGCAAAGCB | CAGCAAAGCBHCNHCACTWGGACT | 538 | 1162 |
| 39_13_2_8 | HCNHCACTWGGACTTTTGGCGGAGGGACCAAG | | | |
| VK1- | CCTGAAGATTTTGCAACTTACTACTGTCAGCAAAGCB | CAGCAAAGCBHCAGTBHCWGGACT | 539 | 1163 |
| 39_14_2_8 | HCAGTBHCWGGACTTTTGGCGGAGGGACCAAG | | | |
| VK1- | CCTGAAGATTTTGCAACTTACTACTGTCAGCAAAGCT | CAGCAAAGCTACNHCBHCWGGACT | 540 | 1164 |
| 39_15_2_8 | ACNHCBHCWGGACTTTTGGCGGAGGGACCAAG | | | |
| VK1-39_2_2_8 | CCTGAAGATTTTGCAACTTACTACTGTSWMCAAVNAT | SWMCAAVNATACAGTACTWGGACT | 541 | 1165 |
| | ACAGTACTWGGACTTTTGGCGGAGGGACCAAG | | | |
| VK1-39_3_2_8 | CCTGAAGATTTTGCAACTTACTACTGTSWMCAAAGCB | SWMCAAAGCBHCAGTACTWGGACT | 542 | 1166 |
| | HCAGTACTWGGACTTTTGGCGGAGGGACCAAG | | | |
| VK1-39_4_2_8 | CCTGAAGATTTTGCAACTTACTACTGTSWMCAAAGCT | SWMCAAAGCTACNHCACTWGGACT | 543 | 1167 |
| | ACNHCACTWGGACTTTTGGCGGAGGGACCAAG | | | |
| VK1-39_5_2_8 | CCTGAAGATTTTGCAACTTACTACTGTSWMCAAAGCT | SWMCAAAGCTACAGTBHCWGGACT | 544 | 1168 |
| | ACAGTBHCWGGACTTTTGGCGGAGGGACCAAG | | | |
| VK1-39_6_2_8 | CCTGAAGATTTTGCAACTTACTACTGTCAGSWMVNAT | CAGSWMVNATACAGTACTWGGACT | 545 | 1169 |
| | ACAGTACTWGGACTTTTGGCGGAGGGACCAAG | | | |
| VK1-39_7_2_8 | CCTGAAGATTTTGCAACTTACTACTGTCAGSWMAGCB | CAGSWMAGCBHCAGTACTWGGACT | 546 | 1170 |
| | HCAGTACTWGGACTTTTGGCGGAGGGACCAAG | | | |
| VK1-39_8_2_8 | CCTGAAGATTTTGCAACTTACTACTGTCAGSWMAGCT | CAGSWMAGCTACNHCACTWGGACT | 547 | 1171 |
| | ACNHCACTWGGACTTTTGGCGGAGGGACCAAG | | | |
| VK1-39_9_2_8 | CCTGAAGATTTTGCAACTTACTACTGTCAGSWMAGCT | CAGSWMAGCTACAGTBHCWGGACT | 548 | 1172 |
| | ACAGTBHCWGGACTTTTGGCGGAGGGACCAAG | | | |
| VK1-39_1_3_8 | CCTGAAGATTTTGCAACTTACTACTGTSWMSWMAGCT | SWMSWMAGCTACAGTACTCCTACT | 549 | 1173 |
| | ACAGTACTCCTACTTTTGGCGGAGGGACCAAG | | | |
| VK1- | CCTGAAGATTTTGCAACTTACTACTGTCAGCAAVNAB | CAGCAAVNABHCAGTACTCCTACT | 550 | 1174 |
| 39_10_3_8 | HCAGTACTCCTACTTTTGGCGGAGGGACCAAG | | | |
| VK1- | CCTGAAGATTTTGCAACTTACTACTGTCAGCAAVNAT | CAGCAAVNATACNHCACTCCTACT | 551 | 1175 |
| 39_11_3_8 | ACNHCACTCCTACTTTTGGCGGAGGGACCAAG | | | |
| VK1- | CCTGAAGATTTTGCAACTTACTACTGTCAGCAAVNAT | CAGCAAVNATACAGTBHCCCTACT | 552 | 1176 |
| 39_12_3_8 | ACAGTBHCCCTACTTTTGGCGGAGGGACCAAG | | | |
| VK1- | CCTGAAGATTTTGCAACTTACTACTGTCAGCAAAGCB | CAGCAAAGCBHCNHCACTCCTACT | 553 | 1177 |
| 39_13_3_8 | HCNHCACTCCTACTTTTGGCGGAGGGACCAAG | | | |
| VK1- | CCTGAAGATTTTGCAACTTACTACTGTCAGCAAAGCB | CAGCAAAGCBHCAGTBHCCCTACT | 554 | 1178 |
| 39_14_3_8 | HCAGTBHCCCTACTTTTGGCGGAGGGACCAAG | | | |
| VK1- | CCTGAAGATTTTGCAACTTACTACTGTCAGCAAAGCT | CAGCAAAGCTACNHCBHCCCTACT | 555 | 1179 |
| 39_15_3_8 | ACNHCBHCCCTACTTTTGGCGGAGGGACCAAG | | | |
| VK1-39_2_3_8 | CCTGAAGATTTTGCAACTTACTACTGTSWMCAAVNAT | SWMCAAVNATACAGTACTCCTACT | 556 | 1180 |
| | ACAGTACTCCTACTTTTGGCGGAGGGACCAAG | | | |
| VK1-39_3_3_8 | CCTGAAGATTTTGCAACTTACTACTGTSWMCAAAGCB | SWMCAAAGCBHCAGTACTCCTACT | 557 | 1181 |
| | HCAGTACTCCTACTTTTGGCGGAGGGACCAAG | | | |
| VK1-39_4_3_8 | CCTGAAGATTTTGCAACTTACTACTGTSWMCAAAGCT | SWMCAAAGCTACNHCACTCCTACT | 558 | 1182 |
| | ACNHCACTCCTACTTTTGGCGGAGGGACCAAG | | | |
| VK1-39_5_3_8 | CCTGAAGATTTTGCAACTTACTACTGTSWMCAAAGCT | SWMCAAAGCTACAGTBHCCCTACT | 559 | 1183 |
| | ACAGTBHCCCTACTTTTGGCGGAGGGACCAAG | | | |
| VK1-39_6_3_8 | CCTGAAGATTTTGCAACTTACTACTGTCAGSWMVNAT | CAGSWMVNATACAGTACTCCTACT | 560 | 1184 |
| | ACAGTACTCCTACTTTTGGCGGAGGGACCAAG | | | |
| VK1-39_7_3_8 | CCTGAAGATTTTGCAACTTACTACTGTCAGSWMAGCB | CAGSWMAGCBHCAGTACTCCTACT | 561 | 1185 |
| | HCAGTACTCCTACTTTTGGCGGAGGGACCAAG | | | |
| VK1-39_8_3_8 | CCTGAAGATTTTGCAACTTACTACTGTCAGSWMAGCT | CAGSWMAGCTACNHCACTCCTACT | 562 | 1186 |
| | ACNHCACTCCTACTTTTGGCGGAGGGACCAAG | | | |
| VK1-39_9_3_8 | CCTGAAGATTTTGCAACTTACTACTGTCAGSWMAGCT | CAGSWMAGCTACAGTBHCCCTACT | 563 | 1187 |
| | ACAGTBHCCCTACTTTTGGCGGAGGGACCAAG | | | |
| VK2-28_1_0_8 | GCTGAGGATGTTGGGGTTTATTACTGCDTSSWMGCAC | DTSSWMGCACTCCAGACTTWCACT | 564 | 1188 |
| | TCCAGACTTWCACTTTTGGCGGAGGGACCAAG | | | |
| VK2- | GCTGAGGATGTTGGGGTTTATTACTGCATGCAGVNAM | ATGCAGVNAMNACAGACTTWCACT | 565 | 1189 |
| 28_10_0_8 | NACAGACTTWCACTTTTGGCGGAGGGACCAAG | | | |
| VK2- | GCTGAGGATGTTGGGGTTTATTACTGCATGCAGVNAC | ATGCAGVNACTCSRMACTTWCACT | 566 | 1190 |
| 28_11_0_8 | TCSRMACTTWCACTTTTGGCGGAGGGACCAAG | | | |
| VK2- | GCTGAGGATGTTGGGGTTTATTACTGCATGCAGVNAC | ATGCAGVNACTCCAGVBCTWCACT | 567 | 1191 |
| 28_12_0_8 | TCCAGVBCTWCACTTTTGGCGGAGGGACCAAG | | | |
| VK2- | GCTGAGGATGTTGGGGTTTATTACTGCATGCAGGCAM | ATGCAGGCAMNASRMACTTWCACT | 568 | 1192 |
| 28_13_0_8 | NASRMACTTWCACTTTTGGCGGAGGGACCAAG | | | |
| VK2- | GCTGAGGATGTTGGGGTTTATTACTGCATGCAGGCAM | ATGCAGGCAMNACAGVBCTWCACT | 569 | 1193 |
| 28_14_0_8 | NACAGVBCTWCACTTTTGGCGGAGGGACCAAG | | | |
| VK2- | GCTGAGGATGTTGGGGTTTATTACTGCATGCAGGCAC | ATGCAGGCACTCSRMVBCTWCACT | 570 | 1194 |
| 28_15_0_8 | TCSRMVBCTWCACTTTTGGCGGAGGGACCAAG | | | |
| VK2-28_2_0_8 | GCTGAGGATGTTGGGGTTTATTACTGCDTSCAGVNAC | DTSCAGVNACTCCAGACTTWCACT | 571 | 1195 |
| | TCCAGACTTWCACTTTTGGCGGAGGGACCAAG | | | |
| VK2-28_3_0_8 | GCTGAGGATGTTGGGGTTTATTACTGCDTSCAGGCAM | DTSCAGGCAMNACAGACTTWCACT | 572 | 1196 |
| | NACAGACTTWCACTTTTGGCGGAGGGACCAAG | | | |
| VK2-28_4_0_8 | GCTGAGGATGTTGGGGTTTATTACTGCDTSCAGGCAC | DTSCAGGCACTCSRMACTTWCACT | 573 | 1197 |
| | TCSRMACTTWCACTTTTGGCGGAGGGACCAAG | | | |
| VK2-28_5_0_8 | GCTGAGGATGTTGGGGTTTATTACTGCDTSCAGGCAC | DTSCAGGCACTCCAGVBCTWCACT | 574 | 1198 |
| | TCCAGVBCTWCACTTTTGGCGGAGGGACCAAG | | | |
| VK2-28_6_0_8 | GCTGAGGATGTTGGGGTTTATTACTGCATGSWMVNAC | ATGSWMVNACTCCAGACTTWCACT | 575 | 1199 |
| | TCCAGACTTWCACTTTTGGCGGAGGGACCAAG | | | |
| VK2-28_7_0_8 | GCTGAGGATGTTGGGGTTTATTACTGCATGSWMGCAM | ATGSWMGCAMNACAGACTTWCACT | 576 | 1200 |
| | NACAGACTTWCACTTTTGGCGGAGGGACCAAG | | | |
| VK2-28_8_0_8 | GCTGAGGATGTTGGGGTTTATTACTGCATGSWMGCAC | ATGSWMGCACTCSRMACTTWCACT | 577 | 1201 |
| | TCSRMACTTWCACTTTTGGCGGAGGGACCAAG | | | |
| VK2-28_9_0_8 | GCTGAGGATGTTGGGGTTTATTACTGCATGSWMGCAC | ATGSWMGCACTCCAGVBCTWCACT | 578 | 1202 |
| | TCCAGVBCTWCACTTTTGGCGGAGGGACCAAG | | | |
| VK2-28_1_1_8 | GCTGAGGATGTTGGGGTTTATTACTGCDTSSWMGCAC | DTSSWMGCACTCCAGACTMTCACT | 579 | 1203 |
| | TCCAGACTMTCACTTTTGGCGGAGGGACCAAG | | | |
| VK2- | GCTGAGGATGTTGGGGTTTATTACTGCATGCAGVNAM | ATGCAGVNAMNACAGACTMTCACT | 580 | 1204 |
| 28_10_1_8 | NACAGACTMTCACTTTTGGCGGAGGGACCAAG | | | |
| VK2- | GCTGAGGATGTTGGGGTTTATTACTGCATGCAGVNAC | ATGCAGVNACTCSRMACTMTCACT | 581 | 1205 |
| 28_11_1_8 | TCSRMACTMTCACTTTTGGCGGAGGGACCAAG | | | |
| VK2- | GCTGAGGATGTTGGGGTTTATTACTGCATGCAGVNAC | ATGCAGVNACTCCAGVBCMTCACT | 582 | 1206 |
| 28_12_1_8 | TCCAGVBCMTCACTTTTGGCGGAGGGACCAAG | | | |
| VK2- | GCTGAGGATGTTGGGGTTTATTACTGCATGCAGGCAM | ATGCAGGCAMNASRMACTMTCACT | 583 | 1207 |
| 28_13_1_8 | NASRMACTMTCACTTTTGGCGGAGGGACCAAG | | | |
| VK2- | GCTGAGGATGTTGGGGTTTATTACTGCATGCAGGCAM | ATGCAGGCAMNACAGVBCMTCACT | 584 | 1208 |
| 28_14_1_8 | NACAGVBCMTCACTTTTGGCGGAGGGACCAAG | | | |
| VK2- | GCTGAGGATGTTGGGGTTTATTACTGCATGCAGGCAC | ATGCAGGCACTCSRMVBCMTCACT | 585 | 1209 |
| 28_15_1_8 | TCSRMVBCMTCACTTTTGGCGGAGGGACCAAG | | | |
| VK2-28_2_1_8 | GCTGAGGATGTTGGGGTTTATTACTGCDTSCAGVNAC | DTSCAGVNACTCCAGACTMTCACT | 586 | 1210 |
| | TCCAGACTMTCACTTTTGGCGGAGGGACCAAG | | | |
| VK2-28_3_1_8 | GCTGAGGATGTTGGGGTTTATTACTGCDTSCAGGCAM | DTSCAGGCAMNACAGACTMTCACT | 587 | 1211 |
| | NACAGACTMTCACTTTTGGCGGAGGGACCAAG | | | |
| VK2-28_4_1_8 | GCTGAGGATGTTGGGGTTTATTACTGCDTSCAGGCAC | DTSCAGGCACTCSRMACTMTCACT | 588 | 1212 |
| | TCSRMACTMTCACTTTTGGCGGAGGGACCAAG | | | |
| VK2-28_5_1_8 | GCTGAGGATGTTGGGGTTTATTACTGCDTSCAGGCAC | DTSCAGGCACTCCAGVBCMTCACT | 589 | 1213 |
| | TCCAGVBCMTCACTTTTGGCGGAGGGACCAAG | | | |
| VK2-28_6_1_8 | GCTGAGGATGTTGGGGTTTATTACTGCATGSWMVNAC | ATGSWMVNACTCCAGACTMTCACT | 590 | 1214 |
| | TCCAGACTMTCACTTTTGGCGGAGGGACCAAG | | | |
| VK2-28_7_1_8 | GCTGAGGATGTTGGGGTTTATTACTGCATGSWMGCAM | ATGSWMGCAMNACAGACTMTCACT | 591 | 1215 |
| | NACAGACTMTCACTTTTGGCGGAGGGACCAAG | | | |
| VK2-28_8_1_8 | GCTGAGGATGTTGGGGTTTATTACTGCATGSWMGCAC | ATGSWMGCACTCSRMACTMTCACT | 592 | 1216 |
| | TCSRMACTMTCACTTTTGGCGGAGGGACCAAG | | | |
| VK2-28_9_1_8 | GCTGAGGATGTTGGGGTTTATTACTGCATGSWMGCAC | ATGSWMGCACTCCAGVBCMTCACT | 593 | 1217 |
| | TCCAGVBCMTCACTTTTGGCGGAGGGACCAAG | | | |
| VK2-28_1_2_8 | GCTGAGGATGTTGGGGTTTATTACTGCDTSSWMGCAC | DTSSWMGCACTCCAGACTWGGACT | 594 | 1218 |
| | TCCAGACTWGGACTTTTGGCGGAGGGACCAAG | | | |
| VK2- | GCTGAGGATGTTGGGGTTTATTACTGCATGCAGVNAM | ATGCAGVNAMNACAGACTWGGACT | 595 | 1219 |
| 28_10_2_8 | NACAGACTWGGACTTTTGGCGGAGGGACCAAG | | | |
| VK2- | GCTGAGGATGTTGGGGTTTATTACTGCATGCAGVNAC | ATGCAGVNACTCSRMACTWGGACT | 596 | 1220 |
| 28_11_2_8 | TCSRMACTWGGACTTTTGGCGGAGGGACCAAG | | | |
| VK2- | GCTGAGGATGTTGGGGTTTATTACTGCATGCAGVNAC | ATGCAGVNACTCCAGVBCWGGACT | 597 | 1221 |
| 28_12_2_8 | TCCAGVBCWGGACTTTTGGCGGAGGGACCAAG | | | |
| VK2- | GCTGAGGATGTTGGGGTTTATTACTGCATGCAGGCAM | ATGCAGGCAMNASRMACTWGGACT | 598 | 1222 |
| 28_13_2_8 | NASRMACTWGGACTTTTGGCGGAGGGACCAAG | | | |
| VK2- | GCTGAGGATGTTGGGGTTTATTACTGCATGCAGGCAM | ATGCAGGCAMNACAGVBCWGGACT | 599 | 1223 |
| 28_14_2_8 | NACAGVBCWGGACTTTTGGCGGAGGGACCAAG | | | |
| VK2- | GCTGAGGATGTTGGGGTTTATTACTGCATGCAGGCAC | ATGCAGGCACTCSRMVBCWGGACT | 600 | 1224 |
| 28_15_2_8 | TCSRMVBCWGGACTTTTGGCGGAGGGACCAAG | | | |
| VK2-28_2_2_8 | GCTGAGGATGTTGGGGTTTATTACTGCDTSCAGVNAC | DTSCAGVNACTCCAGACTWGGACT | 601 | 1225 |
| | TCCAGACTWGGACTTTTGGCGGAGGGACCAAG | | | |
| VK2-28_3_2_8 | GCTGAGGATGTTGGGGTTTATTACTGCDTSCAGGCAM | DTSCAGGCAMNACAGACTWGGACT | 602 | 1226 |
| | NACAGACTWGGACTTTTGGCGGAGGGACCAAG | | | |
| VK2-28_4_2_8 | GCTGAGGATGTTGGGGTTTATTACTGCDTSCAGGCAC | DTSCAGGCACTCSRMACTWGGACT | 603 | 1227 |
| | TCSRMACTWGGACTTTTGGCGGAGGGACCAAG | | | |
| VK2-28_5_2_8 | GCTGAGGATGTTGGGGTTTATTACTGCDTSCAGGCAC | DTSCAGGCACTCCAGVBCWGGACT | 604 | 1228 |
| | TCCAGVBCWGGACTTTTGGCGGAGGGACCAAG | | | |
| VK2-28_6_2_8 | GCTGAGGATGTTGGGGTTTATTACTGCATGSWMVNAC | ATGSWMVNACTCCAGACTWGGACT | 605 | 1229 |
| | TCCAGACTWGGACTTTTGGCGGAGGGACCAAG | | | |
| VK2-28_7_2_8 | GCTGAGGATGTTGGGGTTTATTACTGCATGSWMGCAM | ATGSWMGCAMNACAGACTWGGACT | 606 | 1230 |
| | NACAGACTWGGACTTTTGGCGGAGGGACCAAG | | | |
| VK2-28_8_2_8 | GCTGAGGATGTTGGGGTTTATTACTGCATGSWMGCAC | ATGSWMGCACTCSRMACTWGGACT | 607 | 1231 |
| | TCSRMACTWGGACTTTTGGCGGAGGGACCAAG | | | |
| VK2-28_9_2_8 | GCTGAGGATGTTGGGGTTTATTACTGCATGSWMGCAC | ATGSWMGCACTCCAGVBCWGGACT | 608 | 1232 |
| | TCCAGVBCWGGACTTTTGGCGGAGGGACCAAG | | | |
| VK2-28_1_3_8 | GCTGAGGATGTTGGGGTTTATTACTGCDTSSWMGCAC | DTSSWMGCACTCCAGACTCCTACT | 609 | 1233 |
| | TCCAGACTCCTACTTTTGGCGGAGGGACCAAG | | | |
| VK2- | GCTGAGGATGTTGGGGTTTATTACTGCATGCAGVNAM | ATGCAGVNAMNACAGACTCCTACT | 610 | 1234 |
| 28_10_3_8 | NACAGACTCCTACTTTTGGCGGAGGGACCAAG | | | |
| VK2- | GCTGAGGATGTTGGGGTTTATTACTGCATGCAGVNAC | ATGCAGVNACTCSRMACTCCTACT | 611 | 1235 |
| 28_11_3_8 | TCSRMACTCCTACTTTTGGCGGAGGGACCAAG | | | |
| VK2- | GCTGAGGATGTTGGGGTTTATTACTGCATGCAGVNAC | ATGCAGVNACTCCAGVBCCCTACT | 612 | 1236 |
| 28_12_3_8 | TCCAGVBCCCTACTTTTGGCGGAGGGACCAAG | | | |
| VK2- | GCTGAGGATGTTGGGGTTTATTACTGCATGCAGGCAM | ATGCAGGCAMNASRMACTCCTACT | 613 | 1237 |
| 28_13_3_8 | NASRMACTCCTACTTTTGGCGGAGGGACCAAG | | | |
| VK2- | GCTGAGGATGTTGGGGTTTATTACTGCATGCAGGCAM | ATGCAGGCAMNACAGVBCCCTACT | 614 | 1238 |
| 28_14_3_8 | NACAGVBCCCTACTTTTGGCGGAGGGACCAAG | | | |
| VK2- | GCTGAGGATGTTGGGGTTTATTACTGCATGCAGGCAC | ATGCAGGCACTCSRMVBCCCTACT | 615 | 1239 |
| 28_15_3_8 | TCSRMVBCCCTACTTTTGGCGGAGGGACCAAG | | | |
| VK2-28_2_3_8 | GCTGAGGATGTTGGGGTTTATTACTGCDTSCAGVNAC | DTSCAGVNACTCCAGACTCCTACT | 616 | 1240 |
| | TCCAGACTCCTACTTTTGGCGGAGGGACCAAG | | | |
| VK2-28_3_3_8 | GCTGAGGATGTTGGGGTTTATTACTGCDTSCAGGCAM | DTSCAGGCAMNACAGACTCCTACT | 617 | 1241 |
| | NACAGACTCCTACTTTTGGCGGAGGGACCAAG | | | |
| VK2-28_4_3_8 | GCTGAGGATGTTGGGGTTTATTACTGCDTSCAGGCAC | DTSCAGGCACTCSRMACTCCTACT | 618 | 1242 |
| | TCSRMACTCCTACTTTTGGCGGAGGGACCAAG | | | |
| VK2-28_5_3_8 | GCTGAGGATGTTGGGGTTTATTACTGCDTSCAGGCAC | DTSCAGGCACTCCAGVBCCCTACT | 619 | 1243 |
| | TCCAGVBCCCTACTTTTGGCGGAGGGACCAAG | | | |
| VK2-28_6_3_8 | GCTGAGGATGTTGGGGTTTATTACTGCATGSWMVNAC | ATGSWMVNACTCCAGACTCCTACT | 620 | 1244 |
| | TCCAGACTCCTACTTTTGGCGGAGGGACCAAG | | | |
| VK2-28_7_3_8 | GCTGAGGATGTTGGGGTTTATTACTGCATGSWMGCAM | ATGSWMGCAMNACAGACTCCTACT | 621 | 1245 |
| | NACAGACTCCTACTTTTGGCGGAGGGACCAAG | | | |
| VK2-28_8_3_8 | GCTGAGGATGTTGGGGTTTATTACTGCATGSWMGCAC | ATGSWMGCACTCSRMACTCCTACT | 622 | 1246 |
| | TCSRMACTCCTACTTTTGGCGGAGGGACCAAG | | | |
| VK2-28_9_3_8 | GCTGAGGATGTTGGGGTTTATTACTGCATGSWMGCAC | ATGSWMGCACTCCAGVBCCCTACT | 623 | 1247 |
| | TCCAGVBCCCTACTTTTGGCGGAGGGACCAAG | | | |
| VK3-11_1_0_8 | CCTGAAGATTTTGCAGTTTATTACTGTSWMSWMAGAA | SWMSWMAGAAGTAATTGGTWCACT | 624 | 1248 |
| | GTAATTGGTWCACTTTTGGCGGAGGGACCAAG | | | |
| VK3- | CCTGAAGATTTTGCAGTTTATTACTGTCAGCAGBHCN | CAGCAGBHCNHCAATTGGTWCACT | 625 | 1249 |
| 11_10_0_8 | HCAATTGGTWCACTTTTGGCGGAGGGACCAAG | | | |
| VK3- | CCTGAAGATTTTGCAGTTTATTACTGTCAGCAGBHCA | CAGCAGBHCAGTNHCTGGTWCACT | 626 | 1250 |
| 11_11_0_8 | GTNHCTGGTWCACTTTTGGCGGAGGGACCAAG | | | |
| VK3- | CCTGAAGATTTTGCAGTTTATTACTGTCAGCAGBHCA | CAGCAGBHCAGTAATYWCTWCACT | 627 | 1251 |
| 11_12_0_8 | GTAATYWCTWCACTTTTGGCGGAGGGACCAAG | | | |
| VK3- | CCTGAAGATTTTGCAGTTTATTACTGTCAGCAGAGAN | CAGCAGAGANHCNHCTGGTWCACT | 628 | 1252 |
| 11_13_0_8 | HCNHCTGGTWCACTTTTGGCGGAGGGACCAAG | | | |
| VK3- | CCTGAAGATTTTGCAGTTTATTACTGTCAGCAGAGAN | CAGCAGAGANHCAATYWCTWCACT | 629 | 1253 |
| 11_14_0_8 | HCAATYWCTWCACTTTTGGCGGAGGGACCAAG | | | |
| VK3- | CCTGAAGATTTTGCAGTTTATTACTGTCAGCAGAGAA | CAGCAGAGAAGTNHCYWCTWCACT | 630 | 1254 |
| 11_15_0_8 | GTNHCYWCTWCACTTTTGGCGGAGGGACCAAG | | | |
| VK3-11_2_0_8 | CCTGAAGATTTTGCAGTTTATTACTGTSWMCAGBHCA | SWMCAGBHCAGTAATTGGTWCACT | 631 | 1255 |
| | GTAATTGGTWCACTTTTGGCGGAGGGACCAAG | | | |
| VK3-11_3_0_8 | CCTGAAGATTTTGCAGTTTATTACTGTSWMCAGAGAN | SWMCAGAGANHCAATTGGTWCACT | 632 | 1256 |
| | HCAATTGGTWCACTTTTGGCGGAGGGACCAAG | | | |
| VK3-11_4_0_8 | CCTGAAGATTTTGCAGTTTATTACTGTSWMCAGAGAA | SWMCAGAGAAGTNHCTGGTWCACT | 633 | 1257 |
| | GTNHCTGGTWCACTTTTGGCGGAGGGACCAAG | | | |
| VK3-11_5_0_8 | CCTGAAGATTTTGCAGTTTATTACTGTSWMCAGAGAA | SWMCAGAGAAGTAATYWCTWCACT | 634 | 1258 |
| | GTAATYWCTWCACTTTTGGCGGAGGGACCAAG | | | |
| VK3-11_6_0_8 | CCTGAAGATTTTGCAGTTTATTACTGTCAGSWMBHCA | CAGSWMBHCAGTAATTGGTWCACT | 635 | 1259 |
| | GTAATTGGTWCACTTTTGGCGGAGGGACCAAG | | | |
| VK3-11_7_0_8 | CCTGAAGATTTTGCAGTTTATTACTGTCAGSWMAGAN | CAGSWMAGANHCAATTGGTWCACT | 636 | 1260 |
| | HCAATTGGTWCACTTTTGGCGGAGGGACCAAG | | | |
| VK3-11_8_0_8 | CCTGAAGATTTTGCAGTTTATTACTGTCAGSWMAGAA | CAGSWMAGAAGTNHCTGGTWCACT | 637 | 1261 |
| | GTNHCTGGTWCACTTTTGGCGGAGGGACCAAG | | | |
| VK3-11_9_0_8 | CCTGAAGATTTTGCAGTTTATTACTGTCAGSWMAGAA | CAGSWMAGAAGTAATYWCTWCACT | 638 | 1262 |
| | GTAATYWCTWCACTTTTGGCGGAGGGACCAAG | | | |
| VK3-11_1_1_8 | CCTGAAGATTTTGCAGTTTATTACTGTSWMSWMAGAA | SWMSWMAGAAGTAATTGGMTCACT | 639 | 1263 |
| | GTAATTGGMTCACTTTTGGCGGAGGGACCAAG | | | |
| VK3- | CCTGAAGATTTTGCAGTTTATTACTGTCAGCAGBHCN | CAGCAGBHCNHCAATTGGMTCACT | 640 | 1264 |
| 11_10_1_8 | HCAATTGGMTCACTTTTGGCGGAGGGACCAAG | | | |
| VK3- | CCTGAAGATTTTGCAGTTTATTACTGTCAGCAGBHCA | CAGCAGBHCAGTNHCTGGMTCACT | 641 | 1265 |
| 11_11_1_8 | GTNHCTGGMTCACTTTTGGCGGAGGGACCAAG | | | |
| VK3- | CCTGAAGATTTTGCAGTTTATTACTGTCAGCAGBHCA | CAGCAGBHCAGTAATYWCMTCACT | 642 | 1266 |
| 11_12_1_8 | GTAATYWCMTCACTTTTGGCGGAGGGACCAAG | | | |
| VK3- | CCTGAAGATTTTGCAGTTTATTACTGTCAGCAGAGAN | CAGCAGAGANHCNHCTGGMTCACT | 643 | 1267 |
| 11_13_1_8 | HCNHCTGGMTCACTTTTGGCGGAGGGACCAAG | | | |
| VK3- | CCTGAAGATTTTGCAGTTTATTACTGTCAGCAGAGAN | CAGCAGAGANHCAATYWCMTCACT | 644 | 1268 |
| 11_14_1_8 | HCAATYWCMTCACTTTTGGCGGAGGGACCAAG | | | |
| VK3- | CCTGAAGATTTTGCAGTTTATTACTGTCAGCAGAGAA | CAGCAGAGAAGTNHCYWCMTCACT | 645 | 1269 |
| 11_15_1_8 | GTNHCYWCMTCACTTTTGGCGGAGGGACCAAG | | | |
| VK3-11_2_1_8 | CCTGAAGATTTTGCAGTTTATTACTGTSWMCAGBHCA | SWMCAGBHCAGTAATTGGMTCACT | 646 | 1270 |
| | GTAATTGGMTCACTTTTGGCGGAGGGACCAAG | | | |
| VK3-11_3_1_8 | CCTGAAGATTTTGCAGTTTATTACTGTSWMCAGAGAN | SWMCAGAGANHCAATTGGMTCACT | 647 | 1271 |
| | HCAATTGGMTCACTTTTGGCGGAGGGACCAAG | | | |
| VK3-11_4_1_8 | CCTGAAGATTTTGCAGTTTATTACTGTSWMCAGAGAA | SWMCAGAGAAGTNHCTGGMTCACT | 648 | 1272 |
| | GTNHCTGGMTCACTTTTGGCGGAGGGACCAAG | | | |
| VK3-11_5_1_8 | CCTGAAGATTTTGCAGTTTATTACTGTSWMCAGAGAA | SWMCAGAGAAGTAATYWCMTCACT | 649 | 1273 |
| | GTAATYWCMTCACTTTTGGCGGAGGGACCAAG | | | |
| VK3-11_6_1_8 | CCTGAAGATTTTGCAGTTTATTACTGTCAGSWMBHCA | CAGSWMBHCAGTAATTGGMTCACT | 650 | 1274 |
| | GTAATTGGMTCACTTTTGGCGGAGGGACCAAG | | | |
| VK3-11_7_1_8 | CCTGAAGATTTTGCAGTTTATTACTGTCAGSWMAGAN | CAGSWMAGANHCAATTGGMTCACT | 651 | 1275 |
| | HCAATTGGMTCACTTTTGGCGGAGGGACCAAG | | | |
| VK3-11_8_1_8 | CCTGAAGATTTTGCAGTTTATTACTGTCAGSWMAGAA | CAGSWMAGAAGTNHCTGGMTCACT | 652 | 1276 |
| | GTNHCTGGMTCACTTTTGGCGGAGGGACCAAG | | | |
| VK3-11_9_1_8 | CCTGAAGATTTTGCAGTTTATTACTGTCAGSWMAGAA | CAGSWMAGAAGTAATYWCMTCACT | 653 | 1277 |
| | GTAATYWCMTCACTTTTGGCGGAGGGACCAAG | | | |
| VK3-11_1_2_8 | CCTGAAGATTTTGCAGTTTATTACTGTSWMSWMAGAA | SWMSWMAGAAGTAATTGGWGGACT | 654 | 1278 |
| | GTAATTGGWGGACTTTTGGCGGAGGGACCAAG | | | |
| VK3- | CCTGAAGATTTTGCAGTTTATTACTGTCAGCAGBHCN | CAGCAGBHCNHCAATTGGWGGACT | 655 | 1279 |
| 11_10_2_8 | HCAATTGGWGGACTTTTGGCGGAGGGACCAAG | | | |
| VK3- | CCTGAAGATTTTGCAGTTTATTACTGTCAGCAGBHCA | CAGCAGBHCAGTNHCTGGWGGACT | 656 | 1280 |
| 11_11_2_8 | GTNHCTGGWGGACTTTTGGCGGAGGGACCAAG | | | |
| VK3- | CCTGAAGATTTTGCAGTTTATTACTGTCAGCAGBHCA | CAGCAGBHCAGTAATYWCWGGACT | 657 | 1281 |
| 11_12_2_8 | GTAATYWCWGGACTTTTGGCGGAGGGACCAAG | | | |
| VK3- | CCTGAAGATTTTGCAGTTTATTACTGTCAGCAGAGAN | CAGCAGAGANHCNHCTGGWGGACT | 658 | 1282 |
| 11_13_2_8 | HCNHCTGGWGGACTTTTGGCGGAGGGACCAAG | | | |
| VK3- | CCTGAAGATTTTGCAGTTTATTACTGTCAGCAGAGAN | CAGCAGAGANHCAATYWCWGGACT | 659 | 1283 |
| 11_14_2_8 | HCAATYWCWGGACTTTTGGCGGAGGGACCAAG | | | |
| VK3- | CCTGAAGATTTTGCAGTTTATTACTGTCAGCAGAGAA | CAGCAGAGAAGTNHCYWCWGGACT | 660 | 1284 |
| 11_15_2_8 | GTNHCYWCWGGACTTTTGGCGGAGGGACCAAG | | | |
| VK3-11_2_2_8 | CCTGAAGATTTTGCAGTTTATTACTGTSWMCAGBHCA | SWMCAGBHCAGTAATTGGWGGACT | 661 | 1285 |
| | GTAATTGGWGGACTTTTGGCGGAGGGACCAAG | | | |
| VK3-11_3_2_8 | CCTGAAGATTTTGCAGTTTATTACTGTSWMCAGAGAN | SWMCAGAGANHCAATTGGWGGACT | 662 | 1286 |
| | HCAATTGGWGGACTTTTGGCGGAGGGACCAAG | | | |
| VK3-11_4_2_8 | CCTGAAGATTTTGCAGTTTATTACTGTSWMCAGAGAA | SWMCAGAGAAGTNHCTGGWGGACT | 663 | 1287 |
| | GTNHCTGGWGGACTTTTGGCGGAGGGACCAAG | | | |
| VK3-11_5_2_8 | CCTGAAGATTTTGCAGTTTATTACTGTSWMCAGAGAA | SWMCAGAGAAGTAATYWCWGGACT | 664 | 1288 |
| | GTAATYWCWGGACTTTTGGCGGAGGGACCAAG | | | |
| VK3-11_6_2_8 | CCTGAAGATTTTGCAGTTTATTACTGTCAGSWMBHCA | CAGSWMBHCAGTAATTGGWGGACT | 665 | 1289 |
| | GTAATTGGWGGACTTTTGGCGGAGGGACCAAG | | | |
| VK3-11_7_2_8 | CCTGAAGATTTTGCAGTTTATTACTGTCAGSWMAGAN | CAGSWMAGANHCAATTGGWGGACT | 666 | 1290 |
| | HCAATTGGWGGACTTTTGGCGGAGGGACCAAG | | | |
| VK3-11_8_2_8 | CCTGAAGATTTTGCAGTTTATTACTGTCAGSWMAGAA | CAGSWMAGAAGTNHCTGGWGGACT | 667 | 1291 |
| | GTNHCTGGWGGACTTTTGGCGGAGGGACCAAG | | | |
| VK3-11_9_2_8 | CCTGAAGATTTTGCAGTTTATTACTGTCAGSWMAGAA | CAGSWMAGAAGTAATYWCWGGACT | 668 | 1292 |
| | GTAATYWCWGGACTTTTGGCGGAGGGACCAAG | | | |
| VK3-11_1_3_8 | CCTGAAGATTTTGCAGTTTATTACTGTSWMSWMAGAA | SWMSWMAGAAGTAATTGGCCTACT | 669 | 1293 |
| | GTAATTGGCCTACTTTTGGCGGAGGGACCAAG | | | |
| VK3- | CCTGAAGATTTTGCAGTTTATTACTGTCAGCAGBHCN | CAGCAGBHCNHCAATTGGCCTACT | 670 | 1294 |
| 11_10_3_8 | HCAATTGGCCTACTTTTGGCGGAGGGACCAAG | | | |
| VK3- | CCTGAAGATTTTGCAGTTTATTACTGTCAGCAGBHCA | CAGCAGBHCAGTNHCTGGCCTACT | 671 | 1295 |
| 11_11_3_8 | GTNHCTGGCCTACTTTTGGCGGAGGGACCAAG | | | |
| VK3- | CCTGAAGATTTTGCAGTTTATTACTGTCAGCAGBHCA | CAGCAGBHCAGTAATYWCCCTACT | 672 | 1296 |
| 11_12_3_8 | GTAATYWCCCTACTTTTGGCGGAGGGACCAAG | | | |
| VK3- | CCTGAAGATTTTGCAGTTTATTACTGTCAGCAGAGAN | CAGCAGAGANHCNHCTGGCCTACT | 673 | 1297 |
| 11_13_3_8 | HCNHCTGGCCTACTTTTGGCGGAGGGACCAAG | | | |
| VK3- | CCTGAAGATTTTGCAGTTTATTACTGTCAGCAGAGAN | CAGCAGAGANHCAATYWCCCTACT | 674 | 1298 |
| 11_14_3_8 | HCAATYWCCCTACTTTTGGCGGAGGGACCAAG | | | |
| VK3- | CCTGAAGATTTTGCAGTTTATTACTGTCAGCAGAGAA | CAGCAGAGAAGTNHCYWCCCTACT | 675 | 1299 |
| 11_15_3_8 | GTNHCYWCCCTACTTTTGGCGGAGGGACCAAG | | | |
| VK3-11_2_3_8 | CCTGAAGATTTTGCAGTTTATTACTGTSWMCAGBHCA | SWMCAGBHCAGTAATTGGCCTACT | 676 | 1300 |
| | GTAATTGGCCTACTTTTGGCGGAGGGACCAAG | | | |
| VK3-11_3_3_8 | CCTGAAGATTTTGCAGTTTATTACTGTSWMCAGAGAN | SWMCAGAGANHCAATTGGCCTACT | 677 | 1301 |
| | HCAATTGGCCTACTTTTGGCGGAGGGACCAAG | | | |
| VK3-11_4_3_8 | CCTGAAGATTTTGCAGTTTATTACTGTSWMCAGAGAA | SWMCAGAGAAGTNHCTGGCCTACT | 678 | 1302 |
| | GTNHCTGGCCTACTTTTGGCGGAGGGACCAAG | | | |
| VK3-11_5_3_8 | CCTGAAGATTTTGCAGTTTATTACTGTSWMCAGAGAA | SWMCAGAGAAGTAATYWCCCTACT | 679 | 1303 |
| | GTAATYWCCCTACTTTTGGCGGAGGGACCAAG | | | |
| VK3-11_6_3_8 | CCTGAAGATTTTGCAGTTTATTACTGTCAGSWMBHCA | CAGSWMBHCAGTAATTGGCCTACT | 680 | 1304 |
| | GTAATTGGCCTACTTTTGGCGGAGGGACCAAG | | | |
| VK3-11_7_3_8 | CCTGAAGATTTTGCAGTTTATTACTGTCAGSWMAGAN | CAGSWMAGANHCAATTGGCCTACT | 681 | 1305 |
| | HCAATTGGCCTACTTTTGGCGGAGGGACCAAG | | | |
| VK3-11_8_3_8 | CCTGAAGATTTTGCAGTTTATTACTGTCAGSWMAGAA | CAGSWMAGAAGTNHCTGGCCTACT | 682 | 1306 |
| | GTNHCTGGCCTACTTTTGGCGGAGGGACCAAG | | | |
| VK3-11_9_3_8 | CCTGAAGATTTTGCAGTTTATTACTGTCAGSWMAGAA | CAGSWMAGAAGTAATYWCCCTACT | 683 | 1307 |
| | GTAATYWCCCTACTTTTGGCGGAGGGACCAAG | | | |
| VK3-15_1_0_8 | CAGTCTGAAGATTTTGCAGTTTATTACTGTSWMSWMT | SWMSWMTACAATAATTGGTWCACT | 684 | 1308 |
| | ACAATAATTGGTWCACTTTTGGCGGAGGGACCAAG | | | |
| VK3- | CAGTCTGAAGATTTTGCAGTTTATTACTGTCAGCAGB | CAGCAGBHCNHCAATTGGTWCACT | 685 | 1249 |
| 15_10_0_8 | HCNHCAATTGGTWCACTTTTGGCGGAGGGACCAAG | | | |
| VK3- | CAGTCTGAAGATTTTGCAGTTTATTACTGTCAGCAGB | CAGCAGBHCAATNHCTGGTWCACT | 686 | 1309 |
| 15_11_0_8 | HCAATNHCTGGTWCACTTTTGGCGGAGGGACCAAG | | | |
| VK3- | CAGTCTGAAGATTTTGCAGTTTATTACTGTCAGCAGB | CAGCAGBHCAATAATYWCTWCACT | 687 | 1310 |
| 15_12_0_8 | HCAATAATYWCTWCACTTTTGGCGGAGGGACCAAG | | | |
| VK3- | CAGTCTGAAGATTTTGCAGTTTATTACTGTCAGCAGT | CAGCAGTACNHCNHCTGGTWCACT | 688 | 1311 |
| 15_13_0_8 | ACNHCNHCTGGTWCACTTTTGGCGGAGGGACCAAG | | | |
| VK3- | CAGTCTGAAGATTTTGCAGTTTATTACTGTCAGCAGT | CAGCAGTACNHCAATYWCTWCACT | 689 | 1073 |
| 15_14_0_8 | ACNHCAATYWCTWCACTTTTGGCGGAGGGACCAAG | | | |
| VK3- | CAGTCTGAAGATTTTGCAGTTTATTACTGTCAGCAGT | CAGCAGTACAATNHCYWCTWCACT | 690 | 1312 |
| 15_15_0_8 | ACAATNHCYWCTWCACTTTTGGCGGAGGGACCAAG | | | |
| VK3-15_2_0_8 | CAGTCTGAAGATTTTGCAGTTTATTACTGTSWMCAGB | SWMCAGBHCAATAATTGGTWCACT | 691 | 1313 |
| | HCAATAATTGGTWCACTTTTGGCGGAGGGACCAAG | | | |
| VK3-15_3_0_8 | CAGTCTGAAGATTTTGCAGTTTATTACTGTSWMCAGT | SWMCAGTACNHCAATTGGTWCACT | 692 | 1314 |
| | ACNHCAATTGGTWCACTTTTGGCGGAGGGACCAAG | | | |
| VK3-15_4_0_8 | CAGTCTGAAGATTTTGCAGTTTATTACTGTSWMCAGT | SWMCAGTACAATNHCTGGTWCACT | 693 | 1315 |
| | ACAATNHCTGGTWCACTTTTGGCGGAGGGACCAAG | | | |
| VK3-15_5_0_8 | CAGTCTGAAGATTTTGCAGTTTATTACTGTSWMCAGT | SWMCAGTACAATAATYWCTWCACT | 694 | 1316 |
| | ACAATAATYWCTWCACTTTTGGCGGAGGGACCAAG | | | |
| VK3-15_6_0_8 | CAGTCTGAAGATTTTGCAGTTTATTACTGTCAGSWMB | CAGSWMBHCAATAATTGGTWCACT | 695 | 1317 |
| | HCAATAATTGGTWCACTTTTGGCGGAGGGACCAAG | | | |
| VK3-15_7_0_8 | CAGTCTGAAGATTTTGCAGTTTATTACTGTCAGSWMT | CAGSWMTACNHCAATTGGTWCACT | 696 | 1318 |
| | ACNHCAATTGGTWCACTTTTGGCGGAGGGACCAAG | | | |
| VK3-15_8_0_8 | CAGTCTGAAGATTTTGCAGTTTATTACTGTCAGSWMT | CAGSWMTACAATNHCTGGTWCACT | 697 | 1319 |
| | ACAATNHCTGGTWCACTTTTGGCGGAGGGACCAAG | | | |
| VK3-15_9_0_8 | CAGTCTGAAGATTTTGCAGTTTATTACTGTCAGSWMT | CAGSWMTACAATAATYWCTWCACT | 698 | 1320 |
| | ACAATAATYWCTWCACTTTTGGCGGAGGGACCAAG | | | |
| VK3-15_1_1_8 | CAGTCTGAAGATTTTGCAGTTTATTACTGTSWMSWMT | SWMSWMTACAATAATTGGMTCACT | 699 | 1321 |
| | ACAATAATTGGMTCACTTTTGGCGGAGGGACCAAG | | | |
| VK3- | CAGTCTGAAGATTTTGCAGTTTATTACTGTCAGCAGB | CAGCAGBHCNHCAATTGGMTCACT | 700 | 1264 |
| 15_10_1_8 | HCNHCAATTGGMTCACTTTTGGCGGAGGGACCAAG | | | |
| VK3- | CAGTCTGAAGATTTTGCAGTTTATTACTGTCAGCAGB | CAGCAGBHCAATNHCTGGMTCACT | 701 | 1322 |
| 15_11_1_8 | HCAATNHCTGGMTCACTTTTGGCGGAGGGACCAAG | | | |
| VK3- | CAGTCTGAAGATTTTGCAGTTTATTACTGTCAGCAGB | CAGCAGBHCAATAATYWCMTCACT | 702 | 1323 |
| 15_12_1_8 | HCAATAATYWCMTCACTTTTGGCGGAGGGACCAAG | | | |
| VK3- | CAGTCTGAAGATTTTGCAGTTTATTACTGTCAGCAGT | CAGCAGTACNHCNHCTGGMTCACT | 703 | 1324 |
| 15_13_1_8 | ACNHCNHCTGGMTCACTTTTGGCGGAGGGACCAAG | | | |
| VK3- | CAGTCTGAAGATTTTGCAGTTTATTACTGTCAGCAGT | CAGCAGTACNHCAATYWCMTCACT | 704 | 1088 |
| 15_14_1_8 | ACNHCAATYWCMTCACTTTTGGCGGAGGGACCAAG | | | |
| VK3- | CAGTCTGAAGATTTTGCAGTTTATTACTGTCAGCAGT | CAGCAGTACAATNHCYWCMTCACT | 705 | 1325 |
| 15_15_1_8 | ACAATNHCYWCMTCACTTTTGGCGGAGGGACCAAG | | | |
| VK3-15_2_1_8 | CAGTCTGAAGATTTTGCAGTTTATTACTGTSWMCAGB | SWMCAGBHCAATAATTGGMTCACT | 706 | 1326 |
| | HCAATAATTGGMTCACTTTTGGCGGAGGGACCAAG | | | |
| VK3-15_3_1_8 | CAGTCTGAAGATTTTGCAGTTTATTACTGTSWMCAGT | SWMCAGTACNHCAATTGGMTCACT | 707 | 1327 |
| | ACNHCAATTGGMTCACTTTTGGCGGAGGGACCAAG | | | |
| VK3-15_4_1_8 | CAGTCTGAAGATTTTGCAGTTTATTACTGTSWMCAGT | SWMCAGTACAATNHCTGGMTCACT | 708 | 1328 |
| | ACAATNHCTGGMTCACTTTTGGCGGAGGGACCAAG | | | |
| VK3-15_5_1_8 | CAGTCTGAAGATTTTGCAGTTTATTACTGTSWMCAGT | SWMCAGTACAATAATYWCMTCACT | 709 | 1329 |
| | ACAATAATYWCMTCACTTTTGGCGGAGGGACCAAG | | | |
| VK3-15_6_1_8 | CAGTCTGAAGATTTTGCAGTTTATTACTGTCAGSWMB | CAGSWMBHCAATAATTGGMTCACT | 710 | 1330 |
| | HCAATAATTGGMTCACTTTTGGCGGAGGGACCAAG | | | |
| VK3-15_7_1_8 | CAGTCTGAAGATTTTGCAGTTTATTACTGTCAGSWMT | CAGSWMTACNHCAATTGGMTCACT | 711 | 1331 |
| | ACNHCAATTGGMTCACTTTTGGCGGAGGGACCAAG | | | |
| VK3-15_8_1_8 | CAGTCTGAAGATTTTGCAGTTTATTACTGTCAGSWMT | CAGSWMTACAATNHCTGGMTCACT | 712 | 1332 |
| | ACAATNHCTGGMTCACTTTTGGCGGAGGGACCAAG | | | |
| VK3-15_9_1_8 | CAGTCTGAAGATTTTGCAGTTTATTACTGTCAGSWMT | CAGSWMTACAATAATYWCMTCACT | 713 | 1333 |
| | ACAATAATYWCMTCACTTTTGGCGGAGGGACCAAG | | | |
| VK3-15_1_2_8 | CAGTCTGAAGATTTTGCAGTTTATTACTGTSWMSWMT | SWMSWMTACAATAATTGGWGGACT | 714 | 1334 |
| | ACAATAATTGGWGGACTTTTGGCGGAGGGACCAAG | | | |
| VK3- | CAGTCTGAAGATTTTGCAGTTTATTACTGTCAGCAGB | CAGCAGBHCNHCAATTGGWGGACT | 715 | 1279 |
| 15_10_2_8 | HCNHCAATTGGWGGACTTTTGGCGGAGGGACCAAG | | | |
| VK3- | CAGTCTGAAGATTTTGCAGTTTATTACTGTCAGCAGB | CAGCAGBHCAATNHCTGGWGGACT | 716 | 1335 |
| 15_11_2_8 | HCAATNHCTGGWGGACTTTTGGCGGAGGGACCAAG | | | |
| VK3- | CAGTCTGAAGATTTTGCAGTTTATTACTGTCAGCAGB | CAGCAGBHCAATAATYWCWGGACT | 717 | 1336 |
| 15_12_2_8 | HCAATAATYWCWGGACTTTTGGCGGAGGGACCAAG | | | |
| VK3- | CAGTCTGAAGATTTTGCAGTTTATTACTGTCAGCAGT | CAGCAGTACNHCNHCTGGWGGACT | 718 | 1337 |
| 15_13_2_8 | ACNHCNHCTGGWGGACTTTTGGCGGAGGGACCAAG | | | |
| VK3- | CAGTCTGAAGATTTTGCAGTTTATTACTGTCAGCAGT | CAGCAGTACNHCAATYWCWGGACT | 719 | 1103 |
| 15_14_2_8 | ACNHCAATYWCWGGACTTTTGGCGGAGGGACCAAG | | | |
| VK3- | CAGTCTGAAGATTTTGCAGTTTATTACTGTCAGCAGT | CAGCAGTACAATNHCYWCWGGACT | 720 | 1338 |
| 15_15_2_8 | ACAATNHCYWCWGGACTTTTGGCGGAGGGACCAAG | | | |
| VK3-15_2_2_8 | CAGTCTGAAGATTTTGCAGTTTATTACTGTSWMCAGB | SWMCAGBHCAATAATTGGWGGACT | 721 | 1339 |
| | HCAATAATTGGWGGACTTTTGGCGGAGGGACCAAG | | | |
| VK3-15_3_2_8 | CAGTCTGAAGATTTTGCAGTTTATTACTGTSWMCAGT | SWMCAGTACNHCAATTGGWGGACT | 722 | 1340 |
| | ACNHCAATTGGWGGACTTTTGGCGGAGGGACCAAG | | | |
| VK3-15_4_2_8 | CAGTCTGAAGATTTTGCAGTTTATTACTGTSWMCAGT | SWMCAGTACAATNHCTGGWGGACT | 723 | 1341 |
| | ACAATNHCTGGWGGACTTTTGGCGGAGGGACCAAG | | | |
| VK3-15_5_2_8 | CAGTCTGAAGATTTTGCAGTTTATTACTGTSWMCAGT | SWMCAGTACAATAATYWCWGGACT | 724 | 1342 |
| | ACAATAATYWCWGGACTTTTGGCGGAGGGACCAAG | | | |
| VK3-15_6_2_8 | CAGTCTGAAGATTTTGCAGTTTATTACTGTCAGSWMB | CAGSWMBHCAATAATTGGWGGACT | 725 | 1343 |
| | HCAATAATTGGWGGACTTTTGGCGGAGGGACCAAG | | | |
| VK3-15_7_2_8 | CAGTCTGAAGATTTTGCAGTTTATTACTGTCAGSWMT | CAGSWMTACNHCAATTGGWGGACT | 726 | 1344 |
| | ACNHCAATTGGWGGACTTTTGGCGGAGGGACCAAG | | | |
| VK3-15_8_2_8 | CAGTCTGAAGATTTTGCAGTTTATTACTGTCAGSWMT | CAGSWMTACAATNHCTGGWGGACT | 727 | 1345 |
| | ACAATNHCTGGWGGACTTTTGGCGGAGGGACCAAG | | | |
| VK3-15_9_2_8 | CAGTCTGAAGATTTTGCAGTTTATTACTGTCAGSWMT | CAGSWMTACAATAATYWCWGGACT | 728 | 1346 |
| | ACAATAATYWCWGGACTTTTGGCGGAGGGACCAAG | | | |
| VK3-15_1_3_8 | CAGTCTGAAGATTTTGCAGTTTATTACTGTSWMSWMT | SWMSWMTACAATAATTGGCCTACT | 729 | 1347 |
| | ACAATAATTGGCCTACTTTTGGCGGAGGGACCAAG | | | |
| VK3- | CAGTCTGAAGATTTTGCAGTTTATTACTGTCAGCAGB | CAGCAGBHCNHCAATTGGCCTACT | 730 | 1294 |
| 15_10_3_8 | HCNHCAATTGGCCTACTTTTGGCGGAGGGACCAAG | | | |
| VK3- | CAGTCTGAAGATTTTGCAGTTTATTACTGTCAGCAGB | CAGCAGBHCAATNHCTGGCCTACT | 731 | 1348 |
| 15_11_3_8 | HCAATNHCTGGCCTACTTTTGGCGGAGGGACCAAG | | | |
| VK3- | CAGTCTGAAGATTTTGCAGTTTATTACTGTCAGCAGB | CAGCAGBHCAATAATYWCCCTACT | 732 | 1349 |
| 15_12_3_8 | HCAATAATYWCCCTACTTTTGGCGGAGGGACCAAG | | | |
| VK3- | CAGTCTGAAGATTTTGCAGTTTATTACTGTCAGCAGT | CAGCAGTACNHCNHCTGGCCTACT | 733 | 1350 |
| 15_13_3_8 | ACNHCNHCTGGCCTACTTTTGGCGGAGGGACCAAG | | | |
| VK3- | CAGTCTGAAGATTTTGCAGTTTATTACTGTCAGCAGT | CAGCAGTACNHCAATYWCCCTACT | 734 | 1118 |
| 15_14_3_8 | ACNHCAATYWCCCTACTTTTGGCGGAGGGACCAAG | | | |
| VK3- | CAGTCTGAAGATTTTGCAGTTTATTACTGTCAGCAGT | CAGCAGTACAATNHCYWCCCTACT | 735 | 1351 |
| 15_15_3_8 | ACAATNHCYWCCCTACTTTTGGCGGAGGGACCAAG | | | |
| VK3-15_2_3_8 | CAGTCTGAAGATTTTGCAGTTTATTACTGTSWMCAGB | SWMCAGBHCAATAATTGGCCTACT | 736 | 1352 |
| | HCAATAATTGGCCTACTTTTGGCGGAGGGACCAAG | | | |
| VK3-15_3_3_8 | CAGTCTGAAGATTTTGCAGTTTATTACTGTSWMCAGT | SWMCAGTACNHCAATTGGCCTACT | 737 | 1353 |
| | ACNHCAATTGGCCTACTTTTGGCGGAGGGACCAAG | | | |
| VK3-15_4_3_8 | CAGTCTGAAGATTTTGCAGTTTATTACTGTSWMCAGT | SWMCAGTACAATNHCTGGCCTACT | 738 | 1354 |
| | ACAATNHCTGGCCTACTTTTGGCGGAGGGACCAAG | | | |
| VK3-15_5_3_8 | CAGTCTGAAGATTTTGCAGTTTATTACTGTSWMCAGT | SWMCAGTACAATAATYWCCCTACT | 739 | 1355 |
| | ACAATAATYWCCCTACTTTTGGCGGAGGGACCAAG | | | |
| VK3-15_6_3_8 | CAGTCTGAAGATTTTGCAGTTTATTACTGTCAGSWMB | CAGSWMBHCAATAATTGGCCTACT | 740 | 1356 |
| | HCAATAATTGGCCTACTTTTGGCGGAGGGACCAAG | | | |
| VK3-15_7_3_8 | CAGTCTGAAGATTTTGCAGTTTATTACTGTCAGSWMT | CAGSWMTACNHCAATTGGCCTACT | 741 | 1357 |
| | ACNHCAATTGGCCTACTTTTGGCGGAGGGACCAAG | | | |
| VK3-15_8_3_8 | CAGTCTGAAGATTTTGCAGTTTATTACTGTCAGSWMT | CAGSWMTACAATNHCTGGCCTACT | 742 | 1358 |
| | ACAATNHCTGGCCTACTTTTGGCGGAGGGACCAAG | | | |
| VK3-15_9_3_8 | CAGTCTGAAGATTTTGCAGTTTATTACTGTCAGSWMT | CAGSWMTACAATAATYWCCCTACT | 743 | 1359 |
| | ACAATAATYWCCCTACTTTTGGCGGAGGGACCAAG | | | |
| VK3-20_1_0_8 | CCTGAAGATTTTGCAGTGTATTACTGTSWMSWMTACG | SWMSWMTACGGAAGTAGTTWCACT | 744 | 1360 |
| | GAAGTAGTTWCACTTTTGGCGGAGGGACCAAG | | | |
| VK3- | CCTGAAGATTTTGCAGTGTATTACTGTCAGCAGBHCB | CAGCAGBHCBHCAGTAGTTWCACT | 745 | 1361 |
| 20_10_0_8 | HCAGTAGTTWCACTTTTGGCGGAGGGACCAAG | | | |
| VK3- | CCTGAAGATTTTGCAGTGTATTACTGTCAGCAGBHCG | CAGCAGBHCGGAVNCAGTTWCACT | 746 | 1362 |
| 20_11_0_8 | GAVNCAGTTWCACTTTTGGCGGAGGGACCAAG | | | |
| VK3- | CCTGAAGATTTTGCAGTGTATTACTGTCAGCAGBHCG | CAGCAGBHCGGAAGTBHCTWCACT | 747 | 1363 |
| 20_12_0_8 | GAAGTBHCTWCACTTTTGGCGGAGGGACCAAG | | | |
| VK3- | CCTGAAGATTTTGCAGTGTATTACTGTCAGCAGTACB | CAGCAGTACBHCVNCAGTTWCACT | 748 | 1364 |
| 20_13_0_8 | HCVNCAGTTWCACTTTTGGCGGAGGGACCAAG | | | |
| VK3- | CCTGAAGATTTTGCAGTGTATTACTGTCAGCAGTACB | CAGCAGTACBHCAGTBHCTWCACT | 749 | 1365 |
| 20_14_0_8 | HCAGTBHCTWCACTTTTGGCGGAGGGACCAAG | | | |
| VK3- | CCTGAAGATTTTGCAGTGTATTACTGTCAGCAGTACG | CAGCAGTACGGAVNCBHCTWCACT | 750 | 1366 |
| 20_15_0_8 | GAVNCBHCTWCACTTTTGGCGGAGGGACCAAG | | | |
| VK3-20_2_0_8 | CCTGAAGATTTTGCAGTGTATTACTGTSWMCAGBHCG | SWMCAGBHCGGAAGTAGTTWCACT | 751 | 1367 |
| | GAAGTAGTTWCACTTTTGGCGGAGGGACCAAG | | | |
| VK3-20_3_0_8 | CCTGAAGATTTTGCAGTGTATTACTGTSWMCAGTACB | SWMCAGTACBHCAGTAGTTWCACT | 752 | 1368 |
| | HCAGTAGTTWCACTTTTGGCGGAGGGACCAAG | | | |
| VK3-20_4_0_8 | CCTGAAGATTTTGCAGTGTATTACTGTSWMCAGTACG | SWMCAGTACGGAVNCAGTTWCACT | 753 | 1369 |
| | GAVNCAGTTWCACTTTTGGCGGAGGGACCAAG | | | |
| VK3-20_5_0_8 | CCTGAAGATTTTGCAGTGTATTACTGTSWMCAGTACG | SWMCAGTACGGAAGTBHCTWCACT | 754 | 1370 |
| | GAAGTBHCTWCACTTTTGGCGGAGGGACCAAG | | | |
| VK3-20_6_0_8 | CCTGAAGATTTTGCAGTGTATTACTGTCAGSWMBHCG | CAGSWMBHCGGAAGTAGTTWCACT | 755 | 1371 |
| | GAAGTAGTTWCACTTTTGGCGGAGGGACCAAG | | | |
| VK3-20_7_0_8 | CCTGAAGATTTTGCAGTGTATTACTGTCAGSWMTACB | CAGSWMTACBHCAGTAGTTWCACT | 756 | 1372 |
| | HCAGTAGTTWCACTTTTGGCGGAGGGACCAAG | | | |
| VK3-20_8_0_8 | CCTGAAGATTTTGCAGTGTATTACTGTCAGSWMTACG | CAGSWMTACGGAVNCAGTTWCACT | 757 | 1373 |
| | GAVNCAGTTWCACTTTTGGCGGAGGGACCAAG | | | |
| VK3-20_9_0_8 | CCTGAAGATTTTGCAGTGTATTACTGTCAGSWMTACG | CAGSWMTACGGAAGTBHCTWCACT | 758 | 1374 |
| | GAAGTBHCTWCACTTTTGGCGGAGGGACCAAG | | | |
| VK3-20_1_1_8 | CCTGAAGATTTTGCAGTGTATTACTGTSWMSWMTACG | SWMSWMTACGGAAGTAGTMTCACT | 759 | 1375 |
| | GAAGTAGTMTCACTTTTGGCGGAGGGACCAAG | | | |
| VK3- | CCTGAAGATTTTGCAGTGTATTACTGTCAGCAGBHCB | CAGCAGBHCBHCAGTAGTMTCACT | 760 | 1376 |
| 20_10_1_8 | HCAGTAGTMTCACTTTTGGCGGAGGGACCAAG | | | |
| VK3- | CCTGAAGATTTTGCAGTGTATTACTGTCAGCAGBHCG | CAGCAGBHCGGAVNCAGTMTCACT | 761 | 1377 |
| 20_11_1_8 | GAVNCAGTMTCACTTTTGGCGGAGGGACCAAG | | | |
| VK3- | CCTGAAGATTTTGCAGTGTATTACTGTCAGCAGBHCG | CAGCAGBHCGGAAGTBHCMTCACT | 762 | 1378 |
| 20_12_1_8 | GAAGTBHCMTCACTTTTGGCGGAGGGACCAAG | | | |
| VK3- | CCTGAAGATTTTGCAGTGTATTACTGTCAGCAGTACB | CAGCAGTACBHCVNCAGTMTCACT | 763 | 1379 |
| 20_13_1_8 | HCVNCAGTMTCACTTTTGGCGGAGGGACCAAG | | | |
| VK3- | CCTGAAGATTTTGCAGTGTATTACTGTCAGCAGTACB | CAGCAGTACBHCAGTBHCMTCACT | 764 | 1380 |
| 20_14_1_8 | HCAGTBHCMTCACTTTTGGCGGAGGGACCAAG | | | |
| VK3- | CCTGAAGATTTTGCAGTGTATTACTGTCAGCAGTACG | CAGCAGTACGGAVNCBHCMTCACT | 765 | 1381 |
| 20_15_1_8 | GAVNCBHCMTCACTTTTGGCGGAGGGACCAAG | | | |
| VK3-20_2_1_8 | CCTGAAGATTTTGCAGTGTATTACTGTSWMCAGBHCG | SWMCAGBHCGGAAGTAGTMTCACT | 766 | 1382 |
| | GAAGTAGTMTCACTTTTGGCGGAGGGACCAAG | | | |
| VK3-20_3_1_8 | CCTGAAGATTTTGCAGTGTATTACTGTSWMCAGTACB | SWMCAGTACBHCAGTAGTMTCACT | 767 | 1383 |
| | HCAGTAGTMTCACTTTTGGCGGAGGGACCAAG | | | |
| VK3-20_4_1_8 | CCTGAAGATTTTGCAGTGTATTACTGTSWMCAGTACG | SWMCAGTACGGAVNCAGTMTCACT | 768 | 1384 |
| | GAVNCAGTMTCACTTTTGGCGGAGGGACCAAG | | | |
| VK3-20_5_1_8 | CCTGAAGATTTTGCAGTGTATTACTGTSWMCAGTACG | SWMCAGTACGGAAGTBHCMTCACT | 769 | 1385 |
| | GAAGTBHCMTCACTTTTGGCGGAGGGACCAAG | | | |
| VK3-20_6_1_8 | CCTGAAGATTTTGCAGTGTATTACTGTCAGSWMBHCG | CAGSWMBHCGGAAGTAGTMTCACT | 770 | 1386 |
| | GAAGTAGTMTCACTTTTGGCGGAGGGACCAAG | | | |
| VK3-20_7_1_8 | CCTGAAGATTTTGCAGTGTATTACTGTCAGSWMTACB | CAGSWMTACBHCAGTAGTMTCACT | 771 | 1387 |
| | HCAGTAGTMTCACTTTTGGCGGAGGGACCAAG | | | |
| VK3-20_8_1_8 | CCTGAAGATTTTGCAGTGTATTACTGTCAGSWMTACG | CAGSWMTACGGAVNCAGTMTCACT | 772 | 1388 |
| | GAVNCAGTMTCACTTTTGGCGGAGGGACCAAG | | | |
| VK3-20_9_1_8 | CCTGAAGATTTTGCAGTGTATTACTGTCAGSWMTACG | CAGSWMTACGGAAGTBHCMTCACT | 773 | 1389 |
| | GAAGTBHCMTCACTTTTGGCGGAGGGACCAAG | | | |
| VK3-20_1_2_8 | CCTGAAGATTTTGCAGTGTATTACTGTSWMSWMTACG | SWMSWMTACGGAAGTAGTWGGACT | 774 | 1390 |
| | GAAGTAGTWGGACTTTTGGCGGAGGGACCAAG | | | |
| VK3- | CCTGAAGATTTTGCAGTGTATTACTGTCAGCAGBHCB | CAGCAGBHCBHCAGTAGTWGGACT | 775 | 1391 |
| 20_10_2_8 | HCAGTAGTWGGACTTTTGGCGGAGGGACCAAG | | | |
| VK3- | CCTGAAGATTTTGCAGTGTATTACTGTCAGCAGBHCG | CAGCAGBHCGGAVNCAGTWGGACT | 776 | 1392 |
| 20_11_2_8 | GAVNCAGTWGGACTTTTGGCGGAGGGACCAAG | | | |
| VK3- | CCTGAAGATTTTGCAGTGTATTACTGTCAGCAGBHCG | CAGCAGBHCGGAAGTBHCWGGACT | 777 | 1393 |
| 20_12_2_8 | GAAGTBHCWGGACTTTTGGCGGAGGGACCAAG | | | |
| VK3- | CCTGAAGATTTTGCAGTGTATTACTGTCAGCAGTACB | CAGCAGTACBHCVNCAGTWGGACT | 778 | 1394 |
| 20_13_2_8 | HCVNCAGTWGGACTTTTGGCGGAGGGACCAAG | | | |
| VK3- | CCTGAAGATTTTGCAGTGTATTACTGTCAGCAGTACB | CAGCAGTACBHCAGTBHCWGGACT | 779 | 1395 |
| 20_14_2_8 | HCAGTBHCWGGACTTTTGGCGGAGGGACCAAG | | | |
| VK3- | CCTGAAGATTTTGCAGTGTATTACTGTCAGCAGTACG | CAGCAGTACGGAVNCBHCWGGACT | 780 | 1396 |
| 20_15_2_8 | GAVNCBHCWGGACTTTTGGCGGAGGGACCAAG | | | |
| VK3-20_2_2_8 | CCTGAAGATTTTGCAGTGTATTACTGTSWMCAGBHCG | SWMCAGBHCGGAAGTAGTWGGACT | 781 | 1397 |
| | GAAGTAGTWGGACTTTTGGCGGAGGGACCAAG | | | |
| VK3-20_3_2_8 | CCTGAAGATTTTGCAGTGTATTACTGTSWMCAGTACB | SWMCAGTACBHCAGTAGTWGGACT | 782 | 1398 |
| | HCAGTAGTWGGACTTTTGGCGGAGGGACCAAG | | | |
| VK3-20_4_2_8 | CCTGAAGATTTTGCAGTGTATTACTGTSWMCAGTACG | SWMCAGTACGGAVNCAGTWGGACT | 783 | 1399 |
| | GAVNCAGTWGGACTTTTGGCGGAGGGACCAAG | | | |
| VK3-20_5_2_8 | CCTGAAGATTTTGCAGTGTATTACTGTSWMCAGTACG | SWMCAGTACGGAAGTBHCWGGACT | 784 | 1400 |
| | GAAGTBHCWGGACTTTTGGCGGAGGGACCAAG | | | |
| VK3-20_6_2_8 | CCTGAAGATTTTGCAGTGTATTACTGTCAGSWMBHCG | CAGSWMBHCGGAAGTAGTWGGACT | 785 | 1401 |
| | GAAGTAGTWGGACTTTTGGCGGAGGGACCAAG | | | |
| VK3-20_7_2_8 | CCTGAAGATTTTGCAGTGTATTACTGTCAGSWMTACB | CAGSWMTACBHCAGTAGTWGGACT | 786 | 1402 |
| | HCAGTAGTWGGACTTTTGGCGGAGGGACCAAG | | | |
| VK3-20_8_2_8 | CCTGAAGATTTTGCAGTGTATTACTGTCAGSWMTACG | CAGSWMTACGGAVNCAGTWGGACT | 787 | 1403 |
| | GAVNCAGTWGGACTTTTGGCGGAGGGACCAAG | | | |
| VK3-20_9_2_8 | CCTGAAGATTTTGCAGTGTATTACTGTCAGSWMTACG | CAGSWMTACGGAAGTBHCWGGACT | 788 | 1404 |
| | GAAGTBHCWGGACTTTTGGCGGAGGGACCAAG | | | |
| VK3-20_1_3_8 | CCTGAAGATTTTGCAGTGTATTACTGTSWMSWMTACG | SWMSWMTACGGAAGTAGTCCTACT | 789 | 1405 |
| | GAAGTAGTCCTACTTTTGGCGGAGGGACCAAG | | | |
| VK3- | CCTGAAGATTTTGCAGTGTATTACTGTCAGCAGBHCB | CAGCAGBHCBHCAGTAGTCCTACT | 790 | 1406 |
| 20_10_3_8 | HCAGTAGTCCTACTTTTGGCGGAGGGACCAAG | | | |
| VK3- | CCTGAAGATTTTGCAGTGTATTACTGTCAGCAGBHCG | CAGCAGBHCGGAVNCAGTCCTACT | 791 | 1407 |
| 20_11_3_8 | GAVNCAGTCCTACTTTTGGCGGAGGGACCAAG | | | |
| VK3- | CCTGAAGATTTTGCAGTGTATTACTGTCAGCAGBHCG | CAGCAGBHCGGAAGTBHCCCTACT | 792 | 1408 |
| 20_12_3_8 | GAAGTBHCCCTACTTTTGGCGGAGGGACCAAG | | | |
| VK3- | CCTGAAGATTTTGCAGTGTATTACTGTCAGCAGTACB | CAGCAGTACBHCVNCAGTCCTACT | 793 | 1409 |
| 20_13_3_8 | HCVNCAGTCCTACTTTTGGCGGAGGGACCAAG | | | |
| VK3- | CCTGAAGATTTTGCAGTGTATTACTGTCAGCAGTACB | CAGCAGTACBHCAGTBHCCCTACT | 794 | 1410 |
| 20_14_3_8 | HCAGTBHCCCTACTTTTGGCGGAGGGACCAAG | | | |
| VK3- | CCTGAAGATTTTGCAGTGTATTACTGTCAGCAGTACG | CAGCAGTACGGAVNCBHCCCTACT | 795 | 1411 |
| 20_15_3_8 | GAVNCBHCCCTACTTTTGGCGGAGGGACCAAG | | | |
| VK3-20_2_3_8 | CCTGAAGATTTTGCAGTGTATTACTGTSWMCAGBHCG | SWMCAGBHCGGAAGTAGTCCTACT | 796 | 1412 |
| | GAAGTAGTCCTACTTTTGGCGGAGGGACCAAG | | | |
| VK3-20_3_3_8 | CCTGAAGATTTTGCAGTGTATTACTGTSWMCAGTACB | SWMCAGTACBHCAGTAGTCCTACT | 797 | 1413 |
| | HCAGTAGTCCTACTTTTGGCGGAGGGACCAAG | | | |
| VK3-20_4_3_8 | CCTGAAGATTTTGCAGTGTATTACTGTSWMCAGTACG | SWMCAGTACGGAVNCAGTCCTACT | 798 | 1414 |
| | GAVNCAGTCCTACTTTTGGCGGAGGGACCAAG | | | |
| VK3-20_5_3_8 | CCTGAAGATTTTGCAGTGTATTACTGTSWMCAGTACG | SWMCAGTACGGAAGTBHCCCTACT | 799 | 1415 |
| | GAAGTBHCCCTACTTTTGGCGGAGGGACCAAG | | | |
| VK3-20_6_3_8 | CCTGAAGATTTTGCAGTGTATTACTGTCAGSWMBHCG | CAGSWMBHCGGAAGTAGTCCTACT | 800 | 1416 |
| | GAAGTAGTCCTACTTTTGGCGGAGGGACCAAG | | | |
| VK3-20_7_3_8 | CCTGAAGATTTTGCAGTGTATTACTGTCAGSWMTACB | CAGSWMTACBHCAGTAGTCCTACT | 801 | 1417 |
| | HCAGTAGTCCTACTTTTGGCGGAGGGACCAAG | | | |
| VK3-20_8_3_8 | CCTGAAGATTTTGCAGTGTATTACTGTCAGSWMTACG | CAGSWMTACGGAVNCAGTCCTACT | 802 | 1418 |
| | GAVNCAGTCCTACTTTTGGCGGAGGGACCAAG | | | |
| VK3-20_9_3_8 | CCTGAAGATTTTGCAGTGTATTACTGTCAGSWMTACG | CAGSWMTACGGAAGTBHCCCTACT | 803 | 1419 |
| | GAAGTBHCCCTACTTTTGGCGGAGGGACCAAG | | | |

Jumping Trimer

| | | | | |
|---|---|---|---|---|
| VK1- | CCTGATGATTTTGCAACTTATTACTGCCAGCAGBHCV | CAGCAGBHCVRMMBCTACTWCACT | 804 | 1420 |
| 05_t1_0_8 | RMMBCTACTWCACTTTTGGCGGAGGGACCAAG | | | |
| VK1- | CCTGATGATTTTGCAACTTATTACTGCCAGCAGBHCV | CAGCAGBHCVRMMBCTACMTCACT | 805 | 1421 |
| 05_t1_1_8 | RMMBCTACMTCACTTTTGGCGGAGGGACCAAG | | | |
| VK1- | CCTGATGATTTTGCAACTTATTACTGCCAGCAGBHCV | CAGCAGBHCVRMMBCTACWGGACT | 806 | 1422 |
| 05_t1_2_8 | RMMBCTACWGGACTTTTGGCGGAGGGACCAAG | | | |
| VK1- | CCTGATGATTTTGCAACTTATTACTGCCAGCAGBHCV | CAGCAGBHCVRMMBCTACYCTACT | 807 | 1423 |
| 05_t1_3_8 | RMMBCTACYCTACTTTTGGCGGAGGGACCAAG | | | |
| VK1- | CCTGATGATTTTGCAACTTATTACTGCCAGCAGBHCA | CAGCAGBHCAATMBCYWCTWCACT | 808 | 1424 |
| 05_t2_0_8 | ATMBCYWCTWCACTTTTGGCGGAGGGACCAAG | | | |
| VK1- | CCTGATGATTTTGCAACTTATTACTGCCAGCAGBHCA | CAGCAGBHCAATMBCYWCMTCACT | 809 | 1425 |
| 05_t2_1_8 | ATMBCYWCMTCACTTTTGGCGGAGGGACCAAG | | | |
| VK1- | CCTGATGATTTTGCAACTTATTACTGCCAGCAGBHCA | CAGCAGBHCAATMBCYWCWGGACT | 810 | 1426 |
| 05_t2_2_8 | ATMBCYWCWGGACTTTTGGCGGAGGGACCAAG | | | |
| VK1- | CCTGATGATTTTGCAACTTATTACTGCCAGCAGBHCA | CAGCAGBHCAATMBCYWCYCTACT | 811 | 1427 |
| 05_t2_3_8 | ATMBCYWCYCTACTTTTGGCGGAGGGACCAAG | | | |
| VK1- | CCTGATGATTTTGCAACTTATTACTGCCAGCAGBHCV | CAGCAGBHCVRMAGTYWCTWCACT | 812 | 1428 |
| 05_t3_0_8 | RMAGTYWCTWCACTTTTGGCGGAGGGACCAAG | | | |
| VK1- | CCTGATGATTTTGCAACTTATTACTGCCAGCAGBHCV | CAGCAGBHCVRMAGTYWCMTCACT | 813 | 1429 |
| 05_t3_1_8 | RMAGTYWCMTCACTTTTGGCGGAGGGACCAAG | | | |
| VK1- | CCTGATGATTTTGCAACTTATTACTGCCAGCAGBHCV | CAGCAGBHCVRMAGTYWCWGGACT | 814 | 1430 |
| 05_t3_2_8 | RMAGTYWCWGGACTTTTGGCGGAGGGACCAAG | | | |
| VK1- | CCTGATGATTTTGCAACTTATTACTGCCAGCAGBHCV | CAGCAGBHCVRMAGTYWCYCTACT | 815 | 1431 |
| 05_t3_3_8 | RMAGTYWCYCTACTTTTGGCGGAGGGACCAAG | | | |
| VK1- | CCTGATGATTTTGCAACTTATTACTGCCAGCAGTACV | CAGCAGTACVRMMBCYWCTWCACT | 816 | 1432 |
| 05_t4_0_8 | RMMBCYWCTWCACTTTTGGCGGAGGGACCAAG | | | |
| VK1- | CCTGATGATTTTGCAACTTATTACTGCCAGCAGTACV | CAGCAGTACVRMMBCYWCMTCACT | 817 | 1433 |
| 05_t4_1_8 | RMMBCYWCMTCACTTTTGGCGGAGGGACCAAG | | | |
| VK1- | CCTGATGATTTTGCAACTTATTACTGCCAGCAGTACV | CAGCAGTACVRMMBCYWCWGGACT | 818 | 1434 |
| 05_t4_2_8 | RMMBCYWCWGGACTTTTGGCGGAGGGACCAAG | | | |
| VK1- | CCTGATGATTTTGCAACTTATTACTGCCAGCAGTACV | CAGCAGTACVRMMBCYWCYCTACT | 819 | 1435 |
| 05_t4_3_8 | RMMBCYWCYCTACTTTTGGCGGAGGGACCAAG | | | |
| VK1- | CCTGAAGATTTTGCAACTTATTACTGTCAGCAGRNAN | CAGCAGRNANHCNHCTTCTWCACT | 820 | 1436 |
| 12_t1_0_8 | HCNHCTTCTWCACTTTTGGCGGAGGGACCAAG | | | |
| VK1- | CCTGAAGATTTTGCAACTTATTACTGTCAGCAGRNAN | CAGCAGRNANHCNHCTTCMTCACT | 821 | 1437 |
| 12_t1_1_8 | HCNHCTTCMTCACTTTTGGCGGAGGGACCAAG | | | |
| VK1- | CCTGAAGATTTTGCAACTTATTACTGTCAGCAGRNAN | CAGCAGRNANHCNHCTTCWGGACT | 822 | 1438 |
| 12_t1_2_8 | HCNHCTTCWGGACTTTTGGCGGAGGGACCAAG | | | |
| VK1- | CCTGAAGATTTTGCAACTTATTACTGTCAGCAGRNAN | CAGCAGRNANHCNHCTTCCCTACT | 823 | 1439 |
| 12_t1_3_8 | HCNHCTTCCCTACTTTTGGCGGAGGGACCAAG | | | |
| VK1- | CCTGAAGATTTTGCAACTTATTACTGTCAGCAGRNAN | CAGCAGRNANHCAGTYWCTWCACT | 824 | 1440 |
| 12_t2_0_8 | HCAGTYWCTWCACTTTTGGCGGAGGGACCAAG | | | |
| VK1- | CCTGAAGATTTTGCAACTTATTACTGTCAGCAGRNAN | CAGCAGRNANHCAGTYWCMTCACT | 825 | 1441 |
| 12_t2_1_8 | HCAGTYWCMTCACTTTTGGCGGAGGGACCAAG | | | |
| VK1- | CCTGAAGATTTTGCAACTTATTACTGTCAGCAGRNAN | CAGCAGRNANHCAGTYWCWGGACT | 826 | 1442 |
| 12_t2_2_8 | HCAGTYWCWGGACTTTTGGCGGAGGGACCAAG | | | |
| VK1- | CCTGAAGATTTTGCAACTTATTACTGTCAGCAGRNAN | CAGCAGRNANHCAGTYWCCCTACT | 827 | 1443 |
| 12_t2_3_8 | HCAGTYWCCCTACTTTTGGCGGAGGGACCAAG | | | |
| VK1- | CCTGAAGATTTTGCAACTTATTACTGTCAGCAGRNAA | CAGCAGRNAAATNHCYWCTWCACT | 828 | 1444 |
| 12_t3_0_8 | ATNHCYWCTWCACTTTTGGCGGAGGGACCAAG | | | |
| VK1- | CCTGAAGATTTTGCAACTTATTACTGTCAGCAGRNAA | CAGCAGRNAAATNHCYWCMTCACT | 829 | 1445 |
| 12_t3_1_8 | ATNHCYWCMTCACTTTTGGCGGAGGGACCAAG | | | |
| VK1- | CCTGAAGATTTTGCAACTTATTACTGTCAGCAGRNAA | CAGCAGRNAAATNHCYWCWGGACT | 830 | 1446 |
| 12_t3_2_8 | ATNHCYWCWGGACTTTTGGCGGAGGGACCAAG | | | |
| VK1- | CCTGAAGATTTTGCAACTTATTACTGTCAGCAGRNAA | CAGCAGRNAAATNHCYWCCCTACT | 831 | 1447 |
| 12_t3_3_8 | ATNHCYWCCCTACTTTTGGCGGAGGGACCAAG | | | |
| VK1- | CCTGAAGATTTTGCAACTTATTACTGTCAGCAGGCAN | CAGCAGGCANHCNHCYWCTWCACT | 832 | 1448 |
| 12_t4_0_8 | HCNHCYWCTWCACTTTTGGCGGAGGGACCAAG | | | |
| VK1- | CCTGAAGATTTTGCAACTTATTACTGTCAGCAGGCAN | CAGCAGGCANHCNHCYWCMTCACT | 833 | 1449 |
| 12_t4_1_8 | HCNHCYWCMTCACTTTTGGCGGAGGGACCAAG | | | |
| VK1- | CCTGAAGATTTTGCAACTTATTACTGTCAGCAGGCAN | CAGCAGGCANHCNHCYWCWGGACT | 834 | 1450 |
| 12_t4_2_8 | HCNHCYWCWGGACTTTTGGCGGAGGGACCAAG | | | |
| VK1- | CCTGAAGATTTTGCAACTTATTACTGTCAGCAGGCAN | CAGCAGGCANHCNHCYWCCCTACT | 835 | 1451 |
| 12_t4_3_8 | HCNHCYWCCCTACTTTTGGCGGAGGGACCAAG | | | |
| VK1- | CCTGAAGATATTGCAACATATTACTGTCAGCAGBHCN | CAGCAGBHCNHCNHCCTCTWCACT | 836 | 1452 |
| 33_t1_0_8 | HCNHCCTCTWCACTTTTGGCGGAGGGACCAAG | | | |
| VK1- | CCTGAAGATATTGCAACATATTACTGTCAGCAGBHCN | CAGCAGBHCNHCNHCCTCMTCACT | 837 | 1453 |
| 33_t1_1_8 | HCNHCCTCMTCACTTTTGGCGGAGGGACCAAG | | | |
| VK1- | CCTGAAGATATTGCAACATATTACTGTCAGCAGBHCN | CAGCAGBHCNHCNHCCTCWGGACT | 838 | 1454 |
| 33_t1_2_8 | HCNHCCTCWGGACTTTTGGCGGAGGGACCAAG | | | |
| VK1- | CCTGAAGATATTGCAACATATTACTGTCAGCAGBHCN | CAGCAGBHCNHCNHCCTCCCTACT | 839 | 1455 |
| 33_t1_3_8 | HCNHCCTCCCTACTTTTGGCGGAGGGACCAAG | | | |
| VK1- | CCTGAAGATATTGCAACATATTACTGTCAGCAGBHCN | CAGCAGBHCNHCAATYWCTWCACT | 840 | 1456 |
| 33_t2_0_8 | HCAATYWCTWCACTTTTGGCGGAGGGACCAAG | | | |
| VK1- | CCTGAAGATATTGCAACATATTACTGTCAGCAGBHCN | CAGCAGBHCNHCAATYWCMTCACT | 841 | 1457 |
| 33_t2_1_8 | HCAATYWCMTCACTTTTGGCGGAGGGACCAAG | | | |
| VK1- | CCTGAAGATATTGCAACATATTACTGTCAGCAGBHCN | CAGCAGBHCNHCAATYWCWGGACT | 842 | 1458 |
| 33_t2_2_8 | HCAATYWCWGGACTTTTGGCGGAGGGACCAAG | | | |
| VK1- | CCTGAAGATATTGCAACATATTACTGTCAGCAGBHCN | CAGCAGBHCNHCAATYWCCCTACT | 843 | 1459 |
| 33_t2_3_8 | HCAATYWCCCTACTTTTGGCGGAGGGACCAAG | | | |
| VK1- | CCTGAAGATATTGCAACATATTACTGTCAGCAGBHCG | CAGCAGBHCGATNHCYWCTWCACT | 844 | 1460 |
| 33_t3_0_8 | ATNHCYWCTWCACTTTTGGCGGAGGGACCAAG | | | |
| VK1- | CCTGAAGATATTGCAACATATTACTGTCAGCAGBHCG | CAGCAGBHCGATNHCYWCMTCACT | 845 | 1461 |
| 33_t3_1_8 | ATNHCYWCMTCACTTTTGGCGGAGGGACCAAG | | | |
| VK1- | CCTGAAGATATTGCAACATATTACTGTCAGCAGBHCG | CAGCAGBHCGATNHCYWCWGGACT | 846 | 1462 |
| 33_t3_2_8 | ATNHCYWCWGGACTTTTGGCGGAGGGACCAAG | | | |
| VK1- | CCTGAAGATATTGCAACATATTACTGTCAGCAGBHCG | CAGCAGBHCGATNHCYWCCCTACT | 847 | 1463 |
| 33_t3_3_8 | ATNHCYWCCCTACTTTTGGCGGAGGGACCAAG | | | |
| VK1- | CCTGAAGATATTGCAACATATTACTGTCAGCAGTACN | CAGCAGTACNHCNHCYWCTWCACT | 848 | 1464 |
| 33_t4_0_8 | HCNHCYWCTWCACTTTTGGCGGAGGGACCAAG | | | |
| VK1- | CCTGAAGATATTGCAACATATTACTGTCAGCAGTACN | CAGCAGTACNHCNHCYWCMTCACT | 849 | 1465 |
| 33_t4_1_8 | HCNHCYWCMTCACTTTTGGCGGAGGGACCAAG | | | |
| VK1- | CCTGAAGATATTGCAACATATTACTGTCAGCAGTACN | CAGCAGTACNHCNHCYWCWGGACT | 850 | 1466 |
| 33_t4_2_8 | HCNHCYWCWGGACTTTTGGCGGAGGGACCAAG | | | |
| VK1- | CCTGAAGATATTGCAACATATTACTGTCAGCAGTACN | CAGCAGTACNHCNHCYWCCCTACT | 851 | 1467 |
| 33_t4_3_8 | HCNHCYWCCCTACTTTTGGCGGAGGGACCAAG | | | |
| VK1- | CCTGAAGATTTTGCAACTTACTACTGTCAGCAAVNAB | CAGCAAVNABHCNHCACTTWCACT | 852 | 1468 |
| 39_t1_0_8 | HCNHCACTTWCACTTTTGGCGGAGGGACCAAG | | | |
| VK1- | CCTGAAGATTTTGCAACTTACTACTGTCAGCAAVNAB | CAGCAAVNABHCNHCACTMTCACT | 853 | 1469 |
| 39_t1_1_8 | HCNHCACTMTCACTTTTGGCGGAGGGACCAAG | | | |
| VK1- | CCTGAAGATTTTGCAACTTACTACTGTCAGCAAVNAB | CAGCAAVNABHCNHCACTWGGACT | 854 | 1470 |
| 39_t1_2_8 | HCNHCACTWGGACTTTTGGCGGAGGGACCAAG | | | |
| VK1- | CCTGAAGATTTTGCAACTTACTACTGTCAGCAAVNAB | CAGCAAVNABHCNHCACTCCTACT | 855 | 1471 |
| 39_t1_3_8 | HCNHCACTCCTACTTTTGGCGGAGGGACCAAG | | | |
| VK1- | CCTGAAGATTTTGCAACTTACTACTGTCAGCAAVNAB | CAGCAAVNABHCAGTBHCTWCACT | 856 | 1472 |
| 39_t2_0_8 | HCAGTBHCTWCACTTTTGGCGGAGGGACCAAG | | | |
| VK1- | CCTGAAGATTTTGCAACTTACTACTGTCAGCAAVNAB | CAGCAAVNABHCAGTBHCMTCACT | 857 | 1473 |
| 39_t2_1_8 | HCAGTBHCMTCACTTTTGGCGGAGGGACCAAG | | | |
| VK1- | CCTGAAGATTTTGCAACTTACTACTGTCAGCAAVNAB | CAGCAAVNABHCAGTBHCWGGACT | 858 | 1474 |
| 39_t2_2_8 | HCAGTBHCWGGACTTTTGGCGGAGGGACCAAG | | | |
| VK1- | CCTGAAGATTTTGCAACTTACTACTGTCAGCAAVNAB | CAGCAAVNABHCAGTBHCCCTACT | 859 | 1475 |
| 39_t2_3_8 | HCAGTBHCCCTACTTTTGGCGGAGGGACCAAG | | | |
| VK1- | CCTGAAGATTTTGCAACTTACTACTGTCAGCAAVNAT | CAGCAAVNATACNHCBHCTWCACT | 860 | 1476 |
| 39_t3_0_8 | ACNHCBHCTWCACTTTTGGCGGAGGGACCAAG | | | |
| VK1- | CCTGAAGATTTTGCAACTTACTACTGTCAGCAAVNAT | CAGCAAVNATACNHCBHCMTCACT | 861 | 1477 |
| 39_t3_1_8 | ACNHCBHCMTCACTTTTGGCGGAGGGACCAAG | | | |
| VK1- | CCTGAAGATTTTGCAACTTACTACTGTCAGCAAVNAT | CAGCAAVNATACNHCBHCWGGACT | 862 | 1478 |
| 39_t3_2_8 | ACNHCBHCWGGACTTTTGGCGGAGGGACCAAG | | | |
| VK1- | CCTGAAGATTTTGCAACTTACTACTGTCAGCAAVNAT | CAGCAAVNATACNHCBHCCCTACT | 863 | 1479 |
| 39_t3_3_8 | ACNHCBHCCCTACTTTTGGCGGAGGGACCAAG | | | |
| VK1- | CCTGAAGATTTTGCAACTTACTACTGTCAGCAAAGCB | CAGCAAAGCBHCNHCBHCTWCACT | 864 | 1480 |
| 39_t4_0_8 | HCNHCBHCTWCACTTTTGGCGGAGGGACCAAG | | | |
| VK1- | CCTGAAGATTTTGCAACTTACTACTGTCAGCAAAGCB | CAGCAAAGCBHCNHCBHCMTCACT | 865 | 1481 |
| 39_t4_1_8 | HCNHCBHCMTCACTTTTGGCGGAGGGACCAAG | | | |
| VK1- | CCTGAAGATTTTGCAACTTACTACTGTCAGCAAAGCB | CAGCAAAGCBHCNHCBHCWGGACT | 866 | 1482 |
| 39_t4_2_8 | HCNHCBHCWGGACTTTTGGCGGAGGGACCAAG | | | |
| VK1- | CCTGAAGATTTTGCAACTTACTACTGTCAGCAAAGCB | CAGCAAAGCBHCNHCBHCCCTACT | 867 | 1483 |
| 39_t4_3_8 | HCNHCBHCCCTACTTTTGGCGGAGGGACCAAG | | | |
| VK2- | GCTGAGGATGTTGGGGTTTATTACTGCATGCAGVNAM | ATGCAGVNAMNASRMACTTWCACT | 868 | 1484 |
| 28_t1_0_8 | NASRMACTTWCACTTTTGGCGGAGGGACCAAG | | | |
| VK2- | GCTGAGGATGTTGGGGTTTATTACTGCATGCAGVNAM | ATGCAGVNAMNASRMACTMTCACT | 869 | 1485 |
| 28_t1_1_8 | NASRMACTMTCACTTTTGGCGGAGGGACCAAG | | | |
| VK2- | GCTGAGGATGTTGGGGTTTATTACTGCATGCAGVNAM | ATGCAGVNAMNASRMACTWGGACT | 870 | 1486 |
| 28_t1_2_8 | NASRMACTWGGACTTTTGGCGGAGGGACCAAG | | | |
| VK2- | GCTGAGGATGTTGGGGTTTATTACTGCATGCAGVNAM | ATGCAGVNAMNASRMACTCCTACT | 871 | 1487 |
| 28_t1_3_8 | NASRMACTCCTACTTTTGGCGGAGGGACCAAG | | | |
| VK2- | GCTGAGGATGTTGGGGTTTATTACTGCATGCAGVNAM | ATGCAGVNAMNACAGVBCTWCACT | 872 | 1488 |
| 28_t2_0_8 | NACAGVBCTWCACTTTTGGCGGAGGGACCAAG | | | |
| VK2- | GCTGAGGATGTTGGGGTTTATTACTGCATGCAGVNAM | ATGCAGVNAMNACAGVBCMTCACT | 873 | 1489 |
| 28_t2_1_8 | NACAGVBCMTCACTTTTGGCGGAGGGACCAAG | | | |
| VK2- | GCTGAGGATGTTGGGGTTTATTACTGCATGCAGVNAM | ATGCAGVNAMNACAGVBCWGGACT | 874 | 1490 |
| 28_t2_2_8 | NACAGVBCWGGACTTTTGGCGGAGGGACCAAG | | | |
| VK2- | GCTGAGGATGTTGGGGTTTATTACTGCATGCAGVNAM | ATGCAGVNAMNACAGVBCCCTACT | 875 | 1491 |
| 28_t2_3_8 | NACAGVBCCCTACTTTTGGCGGAGGGACCAAG | | | |
| VK2- | GCTGAGGATGTTGGGGTTTATTACTGCATGCAGVNAC | ATGCAGVNACTCSRMVBCTWCACT | 876 | 1492 |
| 28_t3_0_8 | TCSRMVBCTWCACTTTTGGCGGAGGGACCAAG | | | |
| VK2- | GCTGAGGATGTTGGGGTTTATTACTGCATGCAGVNAC | ATGCAGVNACTCSRMVBCMTCACT | 877 | 1493 |
| 28_t3_1_8 | TCSRMVBCMTCACTTTTGGCGGAGGGACCAAG | | | |
| VK2- | GCTGAGGATGTTGGGGTTTATTACTGCATGCAGVNAC | ATGCAGVNACTCSRMVBCWGGACT | 878 | 1494 |
| 28_t3_2_8 | TCSRMVBCWGGACTTTTGGCGGAGGGACCAAG | | | |
| VK2- | GCTGAGGATGTTGGGGTTTATTACTGCATGCAGVNAC | ATGCAGVNACTCSRMVBCCCTACT | 879 | 1495 |
| 28_t3_3_8 | TCSRMVBCCCTACTTTTGGCGGAGGGACCAAG | | | |
| VK2- | GCTGAGGATGTTGGGGTTTATTACTGCATGCAGGCAM | ATGCAGGCAMNASRMVBCTWCACT | 880 | 1496 |
| 28_t4_0_8 | NASRMVBCTWCACTTTTGGCGGAGGGACCAAG | | | |
| VK2- | GCTGAGGATGTTGGGGTTTATTACTGCATGCAGGCAM | ATGCAGGCAMNASRMVBCMTCACT | 881 | 1497 |
| 28_t4_1_8 | NASRMVBCMTCACTTTTGGCGGAGGGACCAAG | | | |
| VK2- | GCTGAGGATGTTGGGGTTTATTACTGCATGCAGGCAM | ATGCAGGCAMNASRMVBCWGGACT | 882 | 1498 |
| 28_t4_2_8 | NASRMVBCWGGACTTTTGGCGGAGGGACCAAG | | | |
| VK2- | GCTGAGGATGTTGGGGTTTATTACTGCATGCAGGCAM | ATGCAGGCAMNASRMVBCCCTACT | 883 | 1499 |
| 28_t4_3_8 | NASRMVBCCCTACTTTTGGCGGAGGGACCAAG | | | |
| VK3- | CCTGAAGATTTTGCAGTTTATTACTGTCAGCAGBHCN | CAGCAGBHCNHCNHCTGGTWCACT | 884 | 1500 |
| 11_t1_0_8 | HCNHCTGGTWCACTTTTGGCGGAGGGACCAAG | | | |
| VK3- | CCTGAAGATTTTGCAGTTTATTACTGTCAGCAGBHCN | CAGCAGBHCNHCNHCTGGMTCACT | 885 | 1501 |
| 11_t1_1_8 | HCNHCTGGMTCACTTTTGGCGGAGGGACCAAG | | | |
| VK3- | CCTGAAGATTTTGCAGTTTATTACTGTCAGCAGBHCN | CAGCAGBHCNHCNHCTGGWGGACT | 886 | 1502 |
| 11_t1_2_8 | HCNHCTGGWGGACTTTTGGCGGAGGGACCAAG | | | |
| VK3- | CCTGAAGATTTTGCAGTTTATTACTGTCAGCAGBHCN | CAGCAGBHCNHCNHCTGGCCTACT | 887 | 1503 |
| 11_t1_3_8 | HCNHCTGGCCTACTTTTGGCGGAGGGACCAAG | | | |
| VK3- | CCTGAAGATTTTGCAGTTTATTACTGTCAGCAGBHCN | CAGCAGBHCNHCAATYWCTWCACT | 888 | 1456 |
| 11_t2_0_8 | HCAATYWCTWCACTTTTGGCGGAGGGACCAAG | | | |
| VK3- | CCTGAAGATTTTGCAGTTTATTACTGTCAGCAGBHCN | CAGCAGBHCNHCAATYWCMTCACT | 889 | 1457 |
| 11_t2_1_8 | HCAATYWCMTCACTTTTGGCGGAGGGACCAAG | | | |
| VK3- | CCTGAAGATTTTGCAGTTTATTACTGTCAGCAGBHCN | CAGCAGBHCNHCAATYWCWGGACT | 890 | 1458 |
| 11_t2_2_8 | HCAATYWCWGGACTTTTGGCGGAGGGACCAAG | | | |
| VK3- | CCTGAAGATTTTGCAGTTTATTACTGTCAGCAGBHCN | CAGCAGBHCNHCAATYWCCCTACT | 891 | 1459 |
| 11_t2_3_8 | HCAATYWCCCTACTTTTGGCGGAGGGACCAAG | | | |
| VK3- | CCTGAAGATTTTGCAGTTTATTACTGTCAGCAGBHCA | CAGCAGBHCAGTNHCYWCTWCACT | 892 | 1504 |
| 11_t3_0_8 | GTNHCYWCTWCACTTTTGGCGGAGGGACCAAG | | | |
| VK3- | CCTGAAGATTTTGCAGTTTATTACTGTCAGCAGBHCA | CAGCAGBHCAGTNHCYWCMTCACT | 893 | 1505 |
| 11_t3_1_8 | GTNHCYWCMTCACTTTTGGCGGAGGGACCAAG | | | |
| VK3- | CCTGAAGATTTTGCAGTTTATTACTGTCAGCAGBHCA | CAGCAGBHCAGTNHCYWCWGGACT | 894 | 1506 |
| 11_t3_2_8 | GTNHCYWCWGGACTTTTGGCGGAGGGACCAAG | | | |
| VK3- | CCTGAAGATTTTGCAGTTTATTACTGTCAGCAGBHCA | CAGCAGBHCAGTNHCYWCCCTACT | 895 | 1507 |
| 11_t3_3_8 | GTNHCYWCCCTACTTTTGGCGGAGGGACCAAG | | | |
| VK3- | CCTGAAGATTTTGCAGTTTATTACTGTCAGCAGAGAN | CAGCAGAGANHCNHCYWCTWCACT | 896 | 1508 |
| 11_t4_0_8 | HCNHCYWCTWCACTTTTGGCGGAGGGACCAAG | | | |
| VK3- | CCTGAAGATTTTGCAGTTTATTACTGTCAGCAGAGAN | CAGCAGAGANHCNHCYWCMTCACT | 897 | 1509 |
| 11_t4_1_8 | HCNHCYWCMTCACTTTTGGCGGAGGGACCAAG | | | |
| VK3- | CCTGAAGATTTTGCAGTTTATTACTGTCAGCAGAGAN | CAGCAGAGANHCNHCYWCWGGACT | 898 | 1510 |
| 11_t4_2_8 | HCNHCYWCWGGACTTTTGGCGGAGGGACCAAG | | | |
| VK3- | CCTGAAGATTTTGCAGTTTATTACTGTCAGCAGAGAN | CAGCAGAGANHCNHCYWCCCTACT | 899 | 1511 |
| 11_t4_3_8 | HCNHCYWCCCTACTTTTGGCGGAGGGACCAAG | | | |
| VK3- | CAGTCTGAAGATTTTGCAGTTTATTACTGTCAGCAGB | CAGCAGBHCNHCNHCTGGTWCACT | 900 | 1500 |
| 15_t1_0_8 | HCNHCNHCTGGTWCACTTTTGGCGGAGGGACCAAG | | | |
| VK3- | CAGTCTGAAGATTTTGCAGTTTATTACTGTCAGCAGB | CAGCAGBHCNHCNHCTGGMTCACT | 901 | 1501 |
| 15_t1_1_8 | HCNHCNHCTGGMTCACTTTTGGCGGAGGGACCAAG | | | |
| VK3- | CAGTCTGAAGATTTTGCAGTTTATTACTGTCAGCAGB | CAGCAGBHCNHCNHCTGGWGGACT | 902 | 1502 |
| 15_t1_2_8 | HCNHCNHCTGGWGGACTTTTGGCGGAGGGACCAAG | | | |
| VK3- | CAGTCTGAAGATTTTGCAGTTTATTACTGTCAGCAGB | CAGCAGBHCNHCNHCTGGCCTACT | 903 | 1503 |
| 15_t1_3_8 | HCNHCNHCTGGCCTACTTTTGGCGGAGGGACCAAG | | | |
| VK3- | CAGTCTGAAGATTTTGCAGTTTATTACTGTCAGCAGB | CAGCAGBHCNHCAATYWCTWCACT | 904 | 1456 |
| 15_t2_0_8 | HCNHCAATYWCTWCACTTTTGGCGGAGGGACCAAG | | | |
| VK3- | CAGTCTGAAGATTTTGCAGTTTATTACTGTCAGCAGB | CAGCAGBHCNHCAATYWCMTCACT | 905 | 1457 |
| 15_t2_1_8 | HCNHCAATYWCMTCACTTTTGGCGGAGGGACCAAG | | | |
| VK3- | CAGTCTGAAGATTTTGCAGTTTATTACTGTCAGCAGB | CAGCAGBHCNHCAATYWCWGGACT | 906 | 1458 |
| 15_t2_2_8 | HCNHCAATYWCWGGACTTTTGGCGGAGGGACCAAG | | | |
| VK3- | CAGTCTGAAGATTTTGCAGTTTATTACTGTCAGCAGB | CAGCAGBHCNHCAATYWCCCTACT | 907 | 1459 |
| 15_t2_3_8 | HCNHCAATYWCCCTACTTTTGGCGGAGGGACCAAG | | | |
| VK3- | CAGTCTGAAGATTTTGCAGTTTATTACTGTCAGCAGB | CAGCAGBHCAATNHCYWCTWCACT | 908 | 1512 |
| 15_t3_0_8 | HCAATNHCYWCTWCACTTTTGGCGGAGGGACCAAG | | | |
| VK3- | CAGTCTGAAGATTTTGCAGTTTATTACTGTCAGCAGB | CAGCAGBHCAATNHCYWCMTCACT | 909 | 1513 |
| 15_t3_1_8 | HCAATNHCYWCMTCACTTTTGGCGGAGGGACCAAG | | | |
| VK3- | CAGTCTGAAGATTTTGCAGTTTATTACTGTCAGCAGB | CAGCAGBHCAATNHCYWCWGGACT | 910 | 1514 |
| 15_t3_2_8 | HCAATNHCYWCWGGACTTTTGGCGGAGGGACCAAG | | | |
| VK3- | CAGTCTGAAGATTTTGCAGTTTATTACTGTCAGCAGB | CAGCAGBHCAATNHCYWCCCTACT | 911 | 1515 |
| 15_t3_3_8 | HCAATNHCYWCCCTACTTTTGGCGGAGGGACCAAG | | | |
| VK3- | CAGTCTGAAGATTTTGCAGTTTATTACTGTCAGCAGT | CAGCAGTACNHCNHCYWCTWCACT | 912 | 1464 |
| 15_t4_0_8 | ACNHCNHCYWCTWCACTTTTGGCGGAGGGACCAAG | | | |
| VK3- | CAGTCTGAAGATTTTGCAGTTTATTACTGTCAGCAGT | CAGCAGTACNHCNHCYWCMTCACT | 913 | 1465 |
| 15_t4_1_8 | ACNHCNHCYWCMTCACTTTTGGCGGAGGGACCAAG | | | |
| VK3- | CAGTCTGAAGATTTTGCAGTTTATTACTGTCAGCAGT | CAGCAGTACNHCNHCYWCWGGACT | 914 | 1466 |
| 15_t4_2_8 | ACNHCNHCYWCWGGACTTTTGGCGGAGGGACCAAG | | | |
| VK3- | CAGTCTGAAGATTTTGCAGTTTATTACTGTCAGCAGT | CAGCAGTACNHCNHCYWCCCTACT | 915 | 1467 |
| 15_t4_3_8 | ACNHCNHCYWCCCTACTTTTGGCGGAGGGACCAAG | | | |
| VK3- | CCTGAAGATTTTGCAGTGTATTACTGTCAGCAGBHCB | CAGCAGBHCBHCVNCAGTTWCACT | 916 | 1516 |
| 20_t1_0_8 | HCVNCAGTTWCACTTTTGGCGGAGGGACCAAG | | | |
| VK3- | CCTGAAGATTTTGCAGTGTATTACTGTCAGCAGBHCB | CAGCAGBHCBHCVNCAGTMTCACT | 917 | 1517 |
| 20_t1_1_8 | HCVNCAGTMTCACTTTTGGCGGAGGGACCAAG | | | |
| VK3- | CCTGAAGATTTTGCAGTGTATTACTGTCAGCAGBHCB | CAGCAGBHCBHCVNCAGTWGGACT | 918 | 1518 |
| 20_t1_2_8 | HCVNCAGTWGGACTTTTGGCGGAGGGACCAAG | | | |
| VK3- | CCTGAAGATTTTGCAGTGTATTACTGTCAGCAGBHCB | CAGCAGBHCBHCVNCAGTCCTACT | 919 | 1519 |
| 20_t1_3_8 | HCVNCAGTCCTACTTTTGGCGGAGGGACCAAG | | | |
| VK3- | CCTGAAGATTTTGCAGTGTATTACTGTCAGCAGBHCB | CAGCAGBHCBHCAGTBHCTWCACT | 920 | 1520 |
| 20_t2_0_8 | HCAGTBHCTWCACTTTTGGCGGAGGGACCAAG | | | |
| VK3- | CCTGAAGATTTTGCAGTGTATTACTGTCAGCAGBHCB | CAGCAGBHCBHCAGTBHCMTCACT | 921 | 1521 |
| 20_t2_1_8 | HCAGTBHCMTCACTTTTGGCGGAGGGACCAAG | | | |
| VK3- | CCTGAAGATTTTGCAGTGTATTACTGTCAGCAGBHCB | CAGCAGBHCBHCAGTBHCWGGACT | 922 | 1522 |
| 20_t2_2_8 | HCAGTBHCWGGACTTTTGGCGGAGGGACCAAG | | | |
| VK3- | CCTGAAGATTTTGCAGTGTATTACTGTCAGCAGBHCB | CAGCAGBHCBHCAGTBHCCCTACT | 923 | 1523 |
| 20_t2_3_8 | HCAGTBHCCCTACTTTTGGCGGAGGGACCAAG | | | |
| VK3- | CCTGAAGATTTTGCAGTGTATTACTGTCAGCAGBHCG | CAGCAGBHCGGAVNCBHCTWCACT | 924 | 1524 |
| 20_t3_0_8 | GAVNCBHCTWCACTTTTGGCGGAGGGACCAAG | | | |
| VK3- | CCTGAAGATTTTGCAGTGTATTACTGTCAGCAGBHCG | CAGCAGBHCGGAVNCBHCMTCACT | 925 | 1525 |
| 20_t3_1_8 | GAVNCBHCMTCACTTTTGGCGGAGGGACCAAG | | | |
| VK3- | CCTGAAGATTTTGCAGTGTATTACTGTCAGCAGBHCG | CAGCAGBHCGGAVNCBHCWGGACT | 926 | 1526 |
| 20_t3_2_8 | GAVNCBHCWGGACTTTTGGCGGAGGGACCAAG | | | |
| VK3- | CCTGAAGATTTTGCAGTGTATTACTGTCAGCAGBHCG | CAGCAGBHCGGAVNCBHCCCTACT | 927 | 1527 |
| 20_t3_3_8 | GAVNCBHCCCTACTTTTGGCGGAGGGACCAAG | | | |
| VK3- | CCTGAAGATTTTGCAGTGTATTACTGTCAGCAGTACB | CAGCAGTACBHCVNCBHCTWCACT | 928 | 1528 |
| 20_t4_0_8 | HCVNCBHCTWCACTTTTGGCGGAGGGACCAAG | | | |
| VK3- | CCTGAAGATTTTGCAGTGTATTACTGTCAGCAGTACB | CAGCAGTACBHCVNCBHCMTCACT | 929 | 1529 |
| 20_t4_1_8 | HCVNCBHCMTCACTTTTGGCGGAGGGACCAAG | | | |
| VK3- | CCTGAAGATTTTGCAGTGTATTACTGTCAGCAGTACB | CAGCAGTACBHCVNCBHCWGGACT | 930 | 1530 |
| 20_t4_2_8 | HCVNCBHCWGGACTTTTGGCGGAGGGACCAAG | | | |
| VK3- | CCTGAAGATTTTGCAGTGTATTACTGTCAGCAGTACB | CAGCAGTACBHCVNCBHCCCTACT | 931 | 1531 |
| 20_t4_3_8 | HCVNCBHCCCTACTTTTGGCGGAGGGACCAAG | | | |
| VK4- | GCTGAAGATGTGGCAGTTTATTACTGTCAGCAGBHCB | CAGCAGBHCBHCNHCACTTWCACT | 932 | 1532 |
| 01_t1_0_8 | HCNHCACTTWCACTTTTGGCGGAGGGACCAAG | | | |
| VK4- | GCTGAAGATGTGGCAGTTTATTACTGTCAGCAGBHCB | CAGCAGBHCBHCNHCACTMTCACT | 933 | 1533 |
| 01_t1_1_8 | HCNHCACTMTCACTTTTGGCGGAGGGACCAAG | | | |
| VK4- | GCTGAAGATGTGGCAGTTTATTACTGTCAGCAGBHCB | CAGCAGBHCBHCNHCACTWGGACT | 934 | 1534 |
| 01_t1_2_8 | HCNHCACTWGGACTTTTGGCGGAGGGACCAAG | | | |
| VK4- | GCTGAAGATGTGGCAGTTTATTACTGTCAGCAGBHCB | CAGCAGBHCBHCNHCACTCCTACT | 935 | 1535 |
| 01_t1_3_8 | HCNHCACTCCTACTTTTGGCGGAGGGACCAAG | | | |
| VK4- | GCTGAAGATGTGGCAGTTTATTACTGTCAGCAGBHCB | CAGCAGBHCBHCAGTBHCTWCACT | 936 | 1520 |
| 01_t2_0_8 | HCAGTBHCTWCACTTTTGGCGGAGGGACCAAG | | | |
| VK4- | GCTGAAGATGTGGCAGTTTATTACTGTCAGCAGBHCB | CAGCAGBHCBHCAGTBHCMTCACT | 937 | 1521 |
| 01_t2_1_8 | HCAGTBHCMTCACTTTTGGCGGAGGGACCAAG | | | |
| VK4- | GCTGAAGATGTGGCAGTTTATTACTGTCAGCAGBHCB | CAGCAGBHCBHCAGTBHCWGGACT | 938 | 1522 |
| 01_t2_2_8 | HCAGTBHCWGGACTTTTGGCGGAGGGACCAAG | | | |
| VK4- | GCTGAAGATGTGGCAGTTTATTACTGTCAGCAGBHCB | CAGCAGBHCBHCAGTBHCCCTACT | 939 | 1523 |
| 01_t2_3_8 | HCAGTBHCCCTACTTTTGGCGGAGGGACCAAG | | | |
| VK4- | GCTGAAGATGTGGCAGTTTATTACTGTCAGCAGBHCT | CAGCAGBHCTACNHCBHCTWCACT | 940 | 1536 |
| 01_t3_0_8 | ACNHCBHCTWCACTTTTGGCGGAGGGACCAAG | | | |
| VK4- | GCTGAAGATGTGGCAGTTTATTACTGTCAGCAGBHCT | CAGCAGBHCTACNHCBHCMTCACT | 941 | 1537 |
| 01_t3_1_8 | ACNHCBHCMTCACTTTTGGCGGAGGGACCAAG | | | |
| VK4- | GCTGAAGATGTGGCAGTTTATTACTGTCAGCAGBHCT | CAGCAGBHCTACNHCBHCWGGACT | 942 | 1538 |
| 01_t3_2_8 | ACNHCBHCWGGACTTTTGGCGGAGGGACCAAG | | | |
| VK4- | GCTGAAGATGTGGCAGTTTATTACTGTCAGCAGBHCT | CAGCAGBHCTACNHCBHCCCTACT | 943 | 1539 |
| 01_t3_3_8 | ACNHCBHCCCTACTTTTGGCGGAGGGACCAAG | | | |
| VK4- | GCTGAAGATGTGGCAGTTTATTACTGTCAGCAGTACB | CAGCAGTACBHCNHCBHCTWCACT | 944 | 1540 |
| 01_t4_0_8 | HCNHCBHCTWCACTTTTGGCGGAGGGACCAAG | | | |
| VK4- | GCTGAAGATGTGGCAGTTTATTACTGTCAGCAGTACB | CAGCAGTACBHCNHCBHCMTCACT | 945 | 1541 |
| 01_t4_1_8 | HCNHCBHCMTCACTTTTGGCGGAGGGACCAAG | | | |
| VK4- | GCTGAAGATGTGGCAGTTTATTACTGTCAGCAGTACB | CAGCAGTACBHCNHCBHCWGGACT | 946 | 1542 |
| 01_t4_2_8 | HCNHCBHCWGGACTTTTGGCGGAGGGACCAAG | | | |
| VK4- | GCTGAAGATGTGGCAGTTTATTACTGTCAGCAGTACB | CAGCAGTACBHCNHCBHCCCTACT | 947 | 1543 |
| 01_t4_3_8 | HCNHCBHCCCTACTTTTGGCGGAGGGACCAAG | | | |

TABLE 6
Oligonucleotide sequences for exemplary VK jumping dimer and trimer sequences with CDRL3 length 9.

| | | | | |
|---|---|---|---|---|
| | | Portion of | | SEQ ID |
| | | Oligonucleotide | SEQ ID | NO |
| | | Corresponding to CDRL3 | NO | (CDRL3 |
| Name | Sequence of Synthesized Oligonucleotide | Proper | (Oligo) | Portion) |

Jumping Dimer

| | | | | |
|---|---|---|---|---|
| VK1-05_1_0_9 | CCTGATGATTTTGCAACTTATTACTGCSWMSWMTACAATAG | SWMSWMTACAATAGTTACYCTT | 1544 | 2168 |
| | TTACYCTTWCACTTTTGGCGGAGGGACCAAG | WCACT | | |
| VK1- | CCTGATGATTTTGCAACTTATTACTGCCAGCAGBHCVRMAG | CAGCAGBHCVRMAGTTACYCTT | 1545 | 2169 |
| 05_10_0_9 | TTACYCTTWCACTTTTGGCGGAGGGACCAAG | WCACT | | |
| VK1- | CCTGATGATTTTGCAACTTATTACTGCCAGCAGBHCAATMB | CAGCAGBHCAATMBCTACYCTT | 1546 | 2170 |
| 05_11_0_9 | CTACYCTTWCACTTTTGGCGGAGGGACCAAG | WCACT | | |
| VK1- | CCTGATGATTTTGCAACTTATTACTGCCAGCAGBHCAATAG | CAGCAGBHCAATAGTYWCYCTT | 1547 | 2171 |
| 05_12_0_9 | TYWCYCTTWCACTTTTGGCGGAGGGACCAAG | WCACT | | |
| VK1- | CCTGATGATTTTGCAACTTATTACTGCCAGCAGTACVRMMB | CAGCAGTACVRMMBCTACYCTT | 1548 | 2172 |
| 05_13_0_9 | CTACYCTTWCACTTTTGGCGGAGGGACCAAG | WCACT | | |
| VK1- | CCTGATGATTTTGCAACTTATTACTGCCAGCAGTACVRMAG | CAGCAGTACVRMAGTYWCYCTT | 1549 | 2173 |
| 05_14_0_9 | TYWCYCTTWCACTTTTGGCGGAGGGACCAAG | WCACT | | |
| VK1- | CCTGATGATTTTGCAACTTATTACTGCCAGCAGTACAATMB | CAGCAGTACAATMBCYWCYCTT | 1550 | 2174 |
| 05_15_0_9 | CYWCYCTTWCACTTTTGGCGGAGGGACCAAG | WCACT | | |
| VK1-05_2_0_9 | CCTGATGATTTTGCAACTTATTACTGCSWMCAGBHCAATAG | SWMCAGBHCAATAGTTACYCTT | 1551 | 2175 |
| | TTACYCTTWCACTTTTGGCGGAGGGACCAAG | WCACT | | |
| VK1-05_3_0_9 | CCTGATGATTTTGCAACTTATTACTGCSWMCAGTACVRMAG | SWMCAGTACVRMAGTTACYCTT | 1552 | 2176 |
| | TTACYCTTWCACTTTTGGCGGAGGGACCAAG | WCACT | | |
| VK1-05_4_0_9 | CCTGATGATTTTGCAACTTATTACTGCSWMCAGTACAATMB | SWMCAGTACAATMBCTACYCTT | 1553 | 2177 |
| | CTACYCTTWCACTTTTGGCGGAGGGACCAAG | WCACT | | |
| VK1-05_5_0_9 | CCTGATGATTTTGCAACTTATTACTGCSWMCAGTACAATAG | SWMCAGTACAATAGTYWCYCTT | 1554 | 2178 |
| | TYWCYCTTWCACTTTTGGCGGAGGGACCAAG | WCACT | | |
| VK1-05_6_0_9 | CCTGATGATTTTGCAACTTATTACTGCCAGSWMBHCAATAG | CAGSWMBHCAATAGTTACYCTT | 1555 | 2179 |
| | TTACYCTTWCACTTTTGGCGGAGGGACCAAG | WCACT | | |
| VK1-05_7_0_9 | CCTGATGATTTTGCAACTTATTACTGCCAGSWMTACVRMAG | CAGSWMTACVRMAGTTACYCTT | 1556 | 2180 |
| | TTACYCTTWCACTTTTGGCGGAGGGACCAAG | WCACT | | |
| VK1-05_8_0_9 | CCTGATGATTTTGCAACTTATTACTGCCAGSWMTACAATMB | CAGSWMTACAATMBCTACYCTT | 1557 | 2181 |
| | CTACYCTTWCACTTTTGGCGGAGGGACCAAG | WCACT | | |
| VK1-05_9_0_9 | CCTGATGATTTTGCAACTTATTACTGCCAGSWMTACAATAG | CAGSWMTACAATAGTYWCYCTT | 1558 | 2182 |
| | TYWCYCTTWCACTTTTGGCGGAGGGACCAAG | WCACT | | |
| VK1-05_1_1_9 | CCTGATGATTTTGCAACTTATTACTGCSWMSWMTACAATAG | SWMSWMTACAATAGTTACYCTM | 1559 | 2183 |
| | TTACYCTMTCACTTTTGGCGGAGGGACCAAG | TCACT | | |
| VK1- | CCTGATGATTTTGCAACTTATTACTGCCAGCAGBHCVRMAG | CAGCAGBHCVRMAGTTACYCTM | 1560 | 2184 |
| 05_10_1_9 | TTACYCTMTCACTTTTGGCGGAGGGACCAAG | TCACT | | |
| VK1- | CCTGATGATTTTGCAACTTATTACTGCCAGCAGBHCAATMB | CAGCAGBHCAATMBCTACYCTM | 1561 | 2185 |
| 05_11_1_9 | CTACYCTMTCACTTTTGGCGGAGGGACCAAG | TCACT | | |
| VK1- | CCTGATGATTTTGCAACTTATTACTGCCAGCAGBHCAATAG | CAGCAGBHCAATAGTYWCYCTM | 1562 | 2186 |
| 05_12_1_9 | TYWCYCTMTCACTTTTGGCGGAGGGACCAAG | TCACT | | |
| VK1- | CCTGATGATTTTGCAACTTATTACTGCCAGCAGTACVRMMB | CAGCAGTACVRMMBCTACYCTM | 1563 | 2187 |
| 05_13_1_9 | CTACYCTMTCACTTTTGGCGGAGGGACCAAG | TCACT | | |
| VK1- | CCTGATGATTTTGCAACTTATTACTGCCAGCAGTACVRMAG | CAGCAGTACVRMAGTYWCYCTM | 1564 | 2188 |
| 05_14_1_9 | TYWCYCTMTCACTTTTGGCGGAGGGACCAAG | TCACT | | |
| VK1- | CCTGATGATTTTGCAACTTATTACTGCCAGCAGTACAATMB | CAGCAGTACAATMBCYWCYCTM | 1565 | 2189 |
| 05_15_1_9 | CYWCYCTMTCACTTTTGGCGGAGGGACCAAG | TCACT | | |
| VK1-05_2_1_9 | CCTGATGATTTTGCAACTTATTACTGCSWMCAGBHCAATAG | SWMCAGBHCAATAGTTACYCTM | 1566 | 2190 |
| | TTACYCTMTCACTTTTGGCGGAGGGACCAAG | TCACT | | |
| VK1-05_3_1_9 | CCTGATGATTTTGCAACTTATTACTGCSWMCAGTACVRMAG | SWMCAGTACVRMAGTTACYCTM | 1567 | 2191 |
| | TTACYCTMTCACTTTTGGCGGAGGGACCAAG | TCACT | | |
| VK1-05_4_1_9 | CCTGATGATTTTGCAACTTATTACTGCSWMCAGTACAATMB | SWMCAGTACAATMBCTACYCTM | 1568 | 2192 |
| | CTACYCTMTCACTTTTGGCGGAGGGACCAAG | TCACT | | |
| VK1-05_5_1_9 | CCTGATGATTTTGCAACTTATTACTGCSWMCAGTACAATAG | SWMCAGTACAATAGTYWCYCTM | 1569 | 2193 |
| | TYWCYCTMTCACTTTTGGCGGAGGGACCAAG | TCACT | | |
| VK1-05_6_1_9 | CCTGATGATTTTGCAACTTATTACTGCCAGSWMBHCAATAG | CAGSWMBHCAATAGTTACYCTM | 1570 | 2194 |
| | TTACYCTMTCACTTTTGGCGGAGGGACCAAG | TCACT | | |
| VK1-05_7_1_9 | CCTGATGATTTTGCAACTTATTACTGCCAGSWMTACVRMAG | CAGSWMTACVRMAGTTACYCTM | 1571 | 2195 |
| | TTACYCTMTCACTTTTGGCGGAGGGACCAAG | TCACT | | |
| VK1-05_8_1_9 | CCTGATGATTTTGCAACTTATTACTGCCAGSWMTACAATMB | CAGSWMTACAATMBCTACYCTM | 1572 | 2196 |
| | CTACYCTMTCACTTTTGGCGGAGGGACCAAG | TCACT | | |
| VK1-05_9_1_9 | CCTGATGATTTTGCAACTTATTACTGCCAGSWMTACAATAG | CAGSWMTACAATAGTYWCYCTM | 1573 | 2197 |
| | TYWCYCTMTCACTTTTGGCGGAGGGACCAAG | TCACT | | |
| VK1-05_1_2_9 | CCTGATGATTTTGCAACTTATTACTGCSWMSWMTACAATAG | SWMSWMTACAATAGTTACYCTW | 1574 | 2198 |
| | TTACYCTWGGACTTTTGGCGGAGGGACCAAG | GGACT | | |
| VK1- | CCTGATGATTTTGCAACTTATTACTGCCAGCAGBHCVRMAG | CAGCAGBHCVRMAGTTACYCTW | 1575 | 2199 |
| 05_10_2_9 | TTACYCTWGGACTTTTGGCGGAGGGACCAAG | GGACT | | |
| VK1- | CCTGATGATTTTGCAACTTATTACTGCCAGCAGBHCAATMB | CAGCAGBHCAATMBCTACYCTW | 1576 | 2200 |
| 05_11_2_9 | CTACYCTWGGACTTTTGGCGGAGGGACCAAG | GGACT | | |
| VK1- | CCTGATGATTTTGCAACTTATTACTGCCAGCAGBHCAATAG | CAGCAGBHCAATAGTYWCYCTW | 1577 | 2201 |
| 05_12_2_9 | TYWCYCTWGGACTTTTGGCGGAGGGACCAAG | GGACT | | |
| VK1- | CCTGATGATTTTGCAACTTATTACTGCCAGCAGTACVRMMB | CAGCAGTACVRMMBCTACYCTW | 1578 | 2202 |
| 05_13_2_9 | CTACYCTWGGACTTTTGGCGGAGGGACCAAG | GGACT | | |
| VK1- | CCTGATGATTTTGCAACTTATTACTGCCAGCAGTACVRMAG | CAGCAGTACVRMAGTYWCYCTW | 1579 | 2203 |
| 05_14_2_9 | TYWCYCTWGGACTTTTGGCGGAGGGACCAAG | GGACT | | |
| VK1- | CCTGATGATTTTGCAACTTATTACTGCCAGCAGTACAATMB | CAGCAGTACAATMBCYWCYCTW | 1580 | 2204 |
| 05_15_2_9 | CYWCYCTWGGACTTTTGGCGGAGGGACCAAG | GGACT | | |
| VK1-05_2_2_9 | CCTGATGATTTTGCAACTTATTACTGCSWMCAGBHCAATAG | SWMCAGBHCAATAGTTACYCTW | 1581 | 2205 |
| | TTACYCTWGGACTTTTGGCGGAGGGACCAAG | GGACT | | |
| VK1-05_3_2_9 | CCTGATGATTTTGCAACTTATTACTGCSWMCAGTACVRMAG | SWMCAGTACVRMAGTTACYCTW | 1582 | 2206 |
| | TTACYCTWGGACTTTTGGCGGAGGGACCAAG | GGACT | | |
| VK1-05_4_2_9 | CCTGATGATTTTGCAACTTATTACTGCSWMCAGTACAATMB | SWMCAGTACAATMBCTACYCTW | 1583 | 2207 |
| | CTACYCTWGGACTTTTGGCGGAGGGACCAAG | GGACT | | |
| VK1-05_5_2_9 | CCTGATGATTTTGCAACTTATTACTGCSWMCAGTACAATAG | SWMCAGTACAATAGTYWCYCTW | 1584 | 2208 |
| | TYWCYCTWGGACTTTTGGCGGAGGGACCAAG | GGACT | | |
| VK1-05_6_2_9 | CCTGATGATTTTGCAACTTATTACTGCCAGSWMBHCAATAG | CAGSWMBHCAATAGTTACYCTW | 1585 | 2209 |
| | TTACYCTWGGACTTTTGGCGGAGGGACCAAG | GGACT | | |
| VK1-05_7_2_9 | CCTGATGATTTTGCAACTTATTACTGCCAGSWMTACVRMAG | CAGSWMTACVRMAGTTACYCTW | 1586 | 2210 |
| | TTACYCTWGGACTTTTGGCGGAGGGACCAAG | GGACT | | |
| VK1-05_8_2_9 | CCTGATGATTTTGCAACTTATTACTGCCAGSWMTACAATMB | CAGSWMTACAATMBCTACYCTW | 1587 | 2211 |
| | CTACYCTWGGACTTTTGGCGGAGGGACCAAG | GGACT | | |
| VK1-05_9_2_9 | CCTGATGATTTTGCAACTTATTACTGCCAGSWMTACAATAG | CAGSWMTACAATAGTYWCYCTW | 1588 | 2212 |
| | TYWCYCTWGGACTTTTGGCGGAGGGACCAAG | GGACT | | |
| VK1-05_1_3_9 | CCTGATGATTTTGCAACTTATTACTGCSWMSWMTACAATAG | SWMSWMTACAATAGTTACYCTC | 1589 | 2213 |
| | TTACYCTCCTACTTTTGGCGGAGGGACCAAG | CTACT | | |
| VK1- | CCTGATGATTTTGCAACTTATTACTGCCAGCAGBHCVRMAG | CAGCAGBHCVRMAGTTACYCTC | 1590 | 2214 |
| 05_10_3_9 | TTACYCTCCTACTTTTGGCGGAGGGACCAAG | CTACT | | |
| VK1- | CCTGATGATTTTGCAACTTATTACTGCCAGCAGBHCAATMB | CAGCAGBHCAATMBCTACYCTC | 1591 | 2215 |
| 05_11_3_9 | CTACYCTCCTACTTTTGGCGGAGGGACCAAG | CTACT | | |
| VK1- | CCTGATGATTTTGCAACTTATTACTGCCAGCAGBHCAATAG | CAGCAGBHCAATAGTYWCYCTC | 1592 | 2216 |
| 05_12_3_9 | TYWCYCTCCTACTTTTGGCGGAGGGACCAAG | CTACT | | |
| VK1- | CCTGATGATTTTGCAACTTATTACTGCCAGCAGTACVRMMB | CAGCAGTACVRMMBCTACYCTC | 1593 | 2217 |
| 05_13_3_9 | CTACYCTCCTACTTTTGGCGGAGGGACCAAG | CTACT | | |
| VK1- | CCTGATGATTTTGCAACTTATTACTGCCAGCAGTACVRMAG | CAGCAGTACVRMAGTYWCYCTC | 1594 | 2218 |
| 05_14_3_9 | TYWCYCTCCTACTTTTGGCGGAGGGACCAAG | CTACT | | |
| VK1- | CCTGATGATTTTGCAACTTATTACTGCCAGCAGTACAATMB | CAGCAGTACAATMBCYWCYCTC | 1595 | 2219 |
| 05_15_3_9 | CYWCYCTCCTACTTTTGGCGGAGGGACCAAG | CTACT | | |
| VK1-05_2_3_9 | CCTGATGATTTTGCAACTTATTACTGCSWMCAGBHCAATAG | SWMCAGBHCAATAGTTACYCTC | 1596 | 2220 |
| | TTACYCTCCTACTTTTGGCGGAGGGACCAAG | CTACT | | |
| VK1-05_3_3_9 | CCTGATGATTTTGCAACTTATTACTGCSWMCAGTACVRMAG | SWMCAGTACVRMAGTTACYCTC | 1597 | 2221 |
| | TTACYCTCCTACTTTTGGCGGAGGGACCAAG | CTACT | | |
| VK1-05_4_3_9 | CCTGATGATTTTGCAACTTATTACTGCSWMCAGTACAATMB | SWMCAGTACAATMBCTACYCTC | 1598 | 2222 |
| | CTACYCTCCTACTTTTGGCGGAGGGACCAAG | CTACT | | |
| VK1-05_5_3_9 | CCTGATGATTTTGCAACTTATTACTGCSWMCAGTACAATAG | SWMCAGTACAATAGTYWCYCTC | 1599 | 2223 |
| | TYWCYCTCCTACTTTTGGCGGAGGGACCAAG | CTACT | | |
| VK1-05_6_3_9 | CCTGATGATTTTGCAACTTATTACTGCCAGSWMBHCAATAG | CAGSWMBHCAATAGTTACYCTC | 1600 | 2224 |
| | TTACYCTCCTACTTTTGGCGGAGGGACCAAG | CTACT | | |
| VK1-05_7_3_9 | CCTGATGATTTTGCAACTTATTACTGCCAGSWMTACVRMAG | CAGSWMTACVRMAGTTACYCTC | 1601 | 2225 |
| | TTACYCTCCTACTTTTGGCGGAGGGACCAAG | CTACT | | |
| VK1-05_8_3_9 | CCTGATGATTTTGCAACTTATTACTGCCAGSWMTACAATMB | CAGSWMTACAATMBCTACYCTC | 1602 | 2226 |
| | CTACYCTCCTACTTTTGGCGGAGGGACCAAG | CTACT | | |
| VK1-05_9_3_9 | CCTGATGATTTTGCAACTTATTACTGCCAGSWMTACAATAG | CAGSWMTACAATAGTYWCYCTC | 1603 | 2227 |
| | TYWCYCTCCTACTTTTGGCGGAGGGACCAAG | CTACT | | |
| VK1-12_1_0_9 | CCTGAAGATTTTGCAACTTATTACTGTSWMSWMGCAAATAG | SWMSWMGCAAATAGTTTCCCTT | 1604 | 2228 |
| | TTTCCCTTWCACTTTTGGCGGAGGGACCAAG | WCACT | | |
| VK1- | CCTGAAGATTTTGCAACTTATTACTGTCAGCAGRNANHCAG | CAGCAGRNANHCAGTTTCCCTT | 1605 | 2229 |
| 12_10_0_9 | TTTCCCTTWCACTTTTGGCGGAGGGACCAAG | WCACT | | |
| VK1- | CCTGAAGATTTTGCAACTTATTACTGTCAGCAGRNAAATNH | CAGCAGRNAAATNHCTTCCCTT | 1606 | 2230 |
| 12_11_0_9 | CTTCCCTTWCACTTTTGGCGGAGGGACCAAG | WCACT | | |
| VK1- | CCTGAAGATTTTGCAACTTATTACTGTCAGCAGRNAAATAG | CAGCAGRNAAATAGTYWCCCTT | 1607 | 2231 |
| 12_12_0_9 | TYWCCCTTWCACTTTTGGCGGAGGGACCAAG | WCACT | | |
| VK1- | CCTGAAGATTTTGCAACTTATTACTGTCAGCAGGCANHCNH | CAGCAGGCANHCNHCTTCCCTT | 1608 | 2232 |
| 12_13_0_9 | CTTCCCTTWCACTTTTGGCGGAGGGACCAAG | WCACT | | |
| VK1- | CCTGAAGATTTTGCAACTTATTACTGTCAGCAGGCANHCAG | CAGCAGGCANHCAGTYWCCCTT | 1609 | 2233 |
| 12_14_0_9 | TYWCCCTTWCACTTTTGGCGGAGGGACCAAG | WCACT | | |
| VK1- | CCTGAAGATTTTGCAACTTATTACTGTCAGCAGGCAAATNH | CAGCAGGCAAATNHCYWCCCTT | 1610 | 2234 |
| 12_15_0_9 | CYWCCCTTWCACTTTTGGCGGAGGGACCAAG | WCACT | | |
| VK1-12_2_0_9 | CCTGAAGATTTTGCAACTTATTACTGTSWMCAGRNAAATAG | SWMCAGRNAAATAGTTTCCCTT | 1611 | 2235 |
| | TTTCCCTTWCACTTTTGGCGGAGGGACCAAG | WCACT | | |
| VK1-12_3_0_9 | CCTGAAGATTTTGCAACTTATTACTGTSWMCAGGCANHCAG | SWMCAGGCANHCAGTTTCCCTT | 1612 | 2236 |
| | TTTCCCTTWCACTTTTGGCGGAGGGACCAAG | WCACT | | |
| VK1-12_4_0_9 | CCTGAAGATTTTGCAACTTATTACTGTSWMCAGGCAAATNH | SWMCAGGCAAATNHCTTCCCTT | 1613 | 2237 |
| | CTTCCCTTWCACTTTTGGCGGAGGGACCAAG | WCACT | | |
| VK1-12_5_0_9 | CCTGAAGATTTTGCAACTTATTACTGTSWMCAGGCAAATAG | SWMCAGGCAAATAGTYWCCCTT | 1614 | 2238 |
| | TYWCCCTTWCACTTTTGGCGGAGGGACCAAG | WCACT | | |
| VK1-12_6_0_9 | CCTGAAGATTTTGCAACTTATTACTGTCAGSWMRNAAATAG | CAGSWMRNAAATAGTTTCCCTT | 1615 | 2239 |
| | TTTCCCTTWCACTTTTGGCGGAGGGACCAAG | WCACT | | |
| VK1-12_7_0_9 | CCTGAAGATTTTGCAACTTATTACTGTCAGSWMGCANHCAG | CAGSWMGCANHCAGTTTCCCTT | 1616 | 2240 |
| | TTTCCCTTWCACTTTTGGCGGAGGGACCAAG | WCACT | | |
| VK1-12_8_0_9 | CCTGAAGATTTTGCAACTTATTACTGTCAGSWMGCAAATNH | CAGSWMGCAAATNHCTTCCCTT | 1617 | 2241 |
| | CTTCCCTTWCACTTTTGGCGGAGGGACCAAG | WCACT | | |
| VK1-12_9_0_9 | CCTGAAGATTTTGCAACTTATTACTGTCAGSWMGCAAATAG | CAGSWMGCAAATAGTYWCCCTT | 1618 | 2242 |
| | TYWCCCTTWCACTTTTGGCGGAGGGACCAAG | WCACT | | |
| VK1-12_1_1_9 | CCTGAAGATTTTGCAACTTATTACTGTSWMSWMGCAAATAG | SWMSWMGCAAATAGTTTCCCTM | 1619 | 2243 |
| | TTTCCCTMTCACTTTTGGCGGAGGGACCAAG | TCACT | | |
| VK1- | CCTGAAGATTTTGCAACTTATTACTGTCAGCAGRNANHCAG | CAGCAGRNANHCAGTTTCCCTM | 1620 | 2244 |
| 12_10_1_9 | TTTCCCTMTCACTTTTGGCGGAGGGACCAAG | TCACT | | |
| VK1- | CCTGAAGATTTTGCAACTTATTACTGTCAGCAGRNAAATNH | CAGCAGRNAAATNHCTTCCCTM | 1621 | 2245 |
| 12_11_1_9 | CTTCCCTMTCACTTTTGGCGGAGGGACCAAG | TCACT | | |
| VK1- | CCTGAAGATTTTGCAACTTATTACTGTCAGCAGRNAAATAG | CAGCAGRNAAATAGTYWCCCTM | 1622 | 2246 |
| 12_12_1_9 | TYWCCCTMTCACTTTTGGCGGAGGGACCAAG | TCACT | | |
| VK1- | CCTGAAGATTTTGCAACTTATTACTGTCAGCAGGCANHCNH | CAGCAGGCANHCNHCTTCCCTM | 1623 | 2247 |
| 12_13_1_9 | CTTCCCTMTCACTTTTGGCGGAGGGACCAAG | TCACT | | |
| VK1- | CCTGAAGATTTTGCAACTTATTACTGTCAGCAGGCANHCAG | CAGCAGGCANHCAGTYWCCCTM | 1624 | 2248 |
| 12_14_1_9 | TYWCCCTMTCACTTTTGGCGGAGGGACCAAG | TCACT | | |
| VK1- | CCTGAAGATTTTGCAACTTATTACTGTCAGCAGGCAAATNH | CAGCAGGCAAATNHCYWCCCTM | 1625 | 2249 |
| 12_15_1_9 | CYWCCCTMTCACTTTTGGCGGAGGGACCAAG | TCACT | | |
| VK1-12_2_1_9 | CCTGAAGATTTTGCAACTTATTACTGTSWMCAGRNAAATAG | SWMCAGRNAAATAGTTTCCCTM | 1626 | 2250 |
| | TTTCCCTMTCACTTTTGGCGGAGGGACCAAG | TCACT | | |
| VK1-12_3_1_9 | CCTGAAGATTTTGCAACTTATTACTGTSWMCAGGCANHCAG | SWMCAGGCANHCAGTTTCCCTM | 1627 | 2251 |
| | TTTCCCTMTCACTTTTGGCGGAGGGACCAAG | TCACT | | |
| VK1-12_4_1_9 | CCTGAAGATTTTGCAACTTATTACTGTSWMCAGGCAAATNH | SWMCAGGCAAATNHCTTCCCTM | 1628 | 2252 |
| | CTTCCCTMTCACTTTTGGCGGAGGGACCAAG | TCACT | | |
| VK1-12_5_1_9 | CCTGAAGATTTTGCAACTTATTACTGTSWMCAGGCAAATAG | SWMCAGGCAAATAGTYWCCCTM | 1629 | 2253 |
| | TYWCCCTMTCACTTTTGGCGGAGGGACCAAG | TCACT | | |
| VK1-12_6_1_9 | CCTGAAGATTTTGCAACTTATTACTGTCAGSWMRNAAATAG | CAGSWMRNAAATAGTTTCCCTM | 1630 | 2254 |
| | TTTCCCTMTCACTTTTGGCGGAGGGACCAAG | TCACT | | |
| VK1-12_7_1_9 | CCTGAAGATTTTGCAACTTATTACTGTCAGSWMGCANHCAG | CAGSWMGCANHCAGTTTCCCTM | 1631 | 2255 |
| | TTTCCCTMTCACTTTTGGCGGAGGGACCAAG | TCACT | | |
| VK1-12_8_1_9 | CCTGAAGATTTTGCAACTTATTACTGTCAGSWMGCAAATNH | CAGSWMGCAAATNHCTTCCCTM | 1632 | 2256 |
| | CTTCCCTMTCACTTTTGGCGGAGGGACCAAG | TCACT | | |
| VK1-12_9_1_9 | CCTGAAGATTTTGCAACTTATTACTGTCAGSWMGCAAATAG | CAGSWMGCAAATAGTYWCCCTM | 1633 | 2257 |
| | TYWCCCTMTCACTTTTGGCGGAGGGACCAAG | TCACT | | |
| VK1-12_1_2_9 | CCTGAAGATTTTGCAACTTATTACTGTSWMSWMGCAAATAG | SWMSWMGCAAATAGTTTCCCTW | 1634 | 2258 |
| | TTTCCCTWGGACTTTTGGCGGAGGGACCAAG | GGACT | | |
| VK1- | CCTGAAGATTTTGCAACTTATTACTGTCAGCAGRNANHCAG | CAGCAGRNANHCAGTTTCCCTW | 1635 | 2259 |
| 12_10_2_9 | TTTCCCTWGGACTTTTGGCGGAGGGACCAAG | GGACT | | |
| VK1- | CCTGAAGATTTTGCAACTTATTACTGTCAGCAGRNAAATNH | CAGCAGRNAAATNHCTTCCCTW | 1636 | 2260 |
| 12_11_2_9 | CTTCCCTWGGACTTTTGGCGGAGGGACCAAG | GGACT | | |
| VK1- | CCTGAAGATTTTGCAACTTATTACTGTCAGCAGRNAAATAG | CAGCAGRNAAATAGTYWCCCTW | 1637 | 2261 |
| 12_12_2_9 | TYWCCCTWGGACTTTTGGCGGAGGGACCAAG | GGACT | | |
| VK1- | CCTGAAGATTTTGCAACTTATTACTGTCAGCAGGCANHCNH | CAGCAGGCANHCNHCTTCCCTW | 1638 | 2262 |
| 12_13_2_9 | CTTCCCTWGGACTTTTGGCGGAGGGACCAAG | GGACT | | |
| VK1- | CCTGAAGATTTTGCAACTTATTACTGTCAGCAGGCANHCAG | CAGCAGGCANHCAGTYWCCCTW | 1639 | 2263 |
| 12_14_2_9 | TYWCCCTWGGACTTTTGGCGGAGGGACCAAG | GGACT | | |
| VK1- | CCTGAAGATTTTGCAACTTATTACTGTCAGCAGGCAAATNH | CAGCAGGCAAATNHCYWCCCTW | 1640 | 2264 |
| 12_15_2_9 | CYWCCCTWGGACTTTTGGCGGAGGGACCAAG | GGACT | | |
| VK1-12_2_2_9 | CCTGAAGATTTTGCAACTTATTACTGTSWMCAGRNAAATAG | SWMCAGRNAAATAGTTTCCCTW | 1641 | 2265 |
| | TTTCCCTWGGACTTTTGGCGGAGGGACCAAG | GGACT | | |
| VK1-12_3_2_9 | CCTGAAGATTTTGCAACTTATTACTGTSWMCAGGCANHCAG | SWMCAGGCANHCAGTTTCCCTW | 1642 | 2266 |
| | TTTCCCTWGGACTTTTGGCGGAGGGACCAAG | GGACT | | |
| VK1-12_4_2_9 | CCTGAAGATTTTGCAACTTATTACTGTSWMCAGGCAAATNH | SWMCAGGCAAATNHCTTCCCTW | 1643 | 2267 |
| | CTTCCCTWGGACTTTTGGCGGAGGGACCAAG | GGACT | | |
| VK1-12_5_2_9 | CCTGAAGATTTTGCAACTTATTACTGTSWMCAGGCAAATAG | SWMCAGGCAAATAGTYWCCCTW | 1644 | 2268 |
| | TYWCCCTWGGACTTTTGGCGGAGGGACCAAG | GGACT | | |
| VK1-12_6_2_9 | CCTGAAGATTTTGCAACTTATTACTGTCAGSWMRNAAATAG | CAGSWMRNAAATAGTTTCCCTW | 1645 | 2269 |
| | TTTCCCTWGGACTTTTGGCGGAGGGACCAAG | GGACT | | |
| VK1-12_7_2_9 | CCTGAAGATTTTGCAACTTATTACTGTCAGSWMGCANHCAG | CAGSWMGCANHCAGTTTCCCTW | 1646 | 2270 |
| | TTTCCCTWGGACTTTTGGCGGAGGGACCAAG | GGACT | | |
| VK1-12_8_2_9 | CCTGAAGATTTTGCAACTTATTACTGTCAGSWMGCAAATNH | CAGSWMGCAAATNHCTTCCCTW | 1647 | 2271 |
| | CTTCCCTWGGACTTTTGGCGGAGGGACCAAG | GGACT | | |
| VK1-12_9_2_9 | CCTGAAGATTTTGCAACTTATTACTGTCAGSWMGCAAATAG | CAGSWMGCAAATAGTYWCCCTW | 1648 | 2272 |
| | TYWCCCTWGGACTTTTGGCGGAGGGACCAAG | GGACT | | |
| VK1-12_1_3_9 | CCTGAAGATTTTGCAACTTATTACTGTSWMSWMGCAAATAG | SWMSWMGCAAATAGTTTCCCTC | 1649 | 2273 |
| | TTTCCCTCCTACTTTTGGCGGAGGGACCAAG | CTACT | | |
| VK1- | CCTGAAGATTTTGCAACTTATTACTGTCAGCAGRNANHCAG | CAGCAGRNANHCAGTTTCCCTC | 1650 | 2274 |
| 12_10_3_9 | TTTCCCTCCTACTTTTGGCGGAGGGACCAAG | CTACT | | |
| VK1- | CCTGAAGATTTTGCAACTTATTACTGTCAGCAGRNAAATNH | CAGCAGRNAAATNHCTTCCCTC | 1651 | 2275 |
| 12_11_3_9 | CTTCCCTCCTACTTTTGGCGGAGGGACCAAG | CTACT | | |
| VK1- | CCTGAAGATTTTGCAACTTATTACTGTCAGCAGRNAAATAG | CAGCAGRNAAATAGTYWCCCTC | 1652 | 2276 |
| 12_12_3_9 | TYWCCCTCCTACTTTTGGCGGAGGGACCAAG | CTACT | | |
| VK1- | CCTGAAGATTTTGCAACTTATTACTGTCAGCAGGCANHCNH | CAGCAGGCANHCNHCTTCCCTC | 1653 | 2277 |
| 12_13_3_9 | CTTCCCTCCTACTTTTGGCGGAGGGACCAAG | CTACT | | |
| VK1- | CCTGAAGATTTTGCAACTTATTACTGTCAGCAGGCANHCAG | CAGCAGGCANHCAGTYWCCCTC | 1654 | 2278 |
| 12_14_3_9 | TYWCCCTCCTACTTTTGGCGGAGGGACCAAG | CTACT | | |
| VK1- | CCTGAAGATTTTGCAACTTATTACTGTCAGCAGGCAAATNH | CAGCAGGCAAATNHCYWCCCTC | 1655 | 2279 |
| 12_15_3_9 | CYWCCCTCCTACTTTTGGCGGAGGGACCAAG | CTACT | | |
| VK1-12_2_3_9 | CCTGAAGATTTTGCAACTTATTACTGTSWMCAGRNAAATAG | SWMCAGRNAAATAGTTTCCCTC | 1656 | 2280 |
| | TTTCCCTCCTACTTTTGGCGGAGGGACCAAG | CTACT | | |
| VK1-12_3_3_9 | CCTGAAGATTTTGCAACTTATTACTGTSWMCAGGCANHCAG | SWMCAGGCANHCAGTTTCCCTC | 1657 | 2281 |
| | TTTCCCTCCTACTTTTGGCGGAGGGACCAAG | CTACT | | |
| VK1-12_4_3_9 | CCTGAAGATTTTGCAACTTATTACTGTSWMCAGGCAAATNH | SWMCAGGCAAATNHCTTCCCTC | 1658 | 2282 |
| | CTTCCCTCCTACTTTTGGCGGAGGGACCAAG | CTACT | | |
| VK1-12_5_3_9 | CCTGAAGATTTTGCAACTTATTACTGTSWMCAGGCAAATAG | SWMCAGGCAAATAGTYWCCCTC | 1659 | 2283 |
| | TYWCCCTCCTACTTTTGGCGGAGGGACCAAG | CTACT | | |
| VK1-12_6_3_9 | CCTGAAGATTTTGCAACTTATTACTGTCAGSWMRNAAATAG | CAGSWMRNAAATAGTTTCCCTC | 1660 | 2284 |
| | TTTCCCTCCTACTTTTGGCGGAGGGACCAAG | CTACT | | |
| VK1-12_7_3_9 | CCTGAAGATTTTGCAACTTATTACTGTCAGSWMGCANHCAG | CAGSWMGCANHCAGTTTCCCTC | 1661 | 2285 |
| | TTTCCCTCCTACTTTTGGCGGAGGGACCAAG | CTACT | | |
| VK1-12_8_3_9 | CCTGAAGATTTTGCAACTTATTACTGTCAGSWMGCAAATNH | CAGSWMGCAAATNHCTTCCCTC | 1662 | 2286 |
| | CTTCCCTCCTACTTTTGGCGGAGGGACCAAG | CTACT | | |
| VK1-12_9_3_9 | CCTGAAGATTTTGCAACTTATTACTGTCAGSWMGCAAATAG | CAGSWMGCAAATAGTYWCCCTC | 1663 | 2287 |
| | TYWCCCTCCTACTTTTGGCGGAGGGACCAAG | CTACT | | |
| VK1-33_1_0_9 | CCTGAAGATATTGCAACATATTACTGTSWMSWMTACGATAA | SWMSWMTACGATAATCTCCCTT | 1664 | 2288 |
| | TCTCCCTTWCACTTTTGGCGGAGGGACCAAG | WCACT | | |
| VK1- | CCTGAAGATATTGCAACATATTACTGTCAGCAGBHCNHCAA | CAGCAGBHCNHCAATCTCCCTT | 1665 | 2289 |
| 33_10_0_9 | TCTCCCTTWCACTTTTGGCGGAGGGACCAAG | WCACT | | |
| VK1- | CCTGAAGATATTGCAACATATTACTGTCAGCAGBHCGATNH | CAGCAGBHCGATNHCCTCCCTT | 1666 | 2290 |
| 33_11_0_9 | CCTCCCTTWCACTTTTGGCGGAGGGACCAAG | WCACT | | |
| VK1- | CCTGAAGATATTGCAACATATTACTGTCAGCAGBHCGATAA | CAGCAGBHCGATAATYWCCCTT | 1667 | 2291 |
| 33_12_0_9 | TYWCCCTTWCACTTTTGGCGGAGGGACCAAG | WCACT | | |
| VK1- | CCTGAAGATATTGCAACATATTACTGTCAGCAGTACNHCNH | CAGCAGTACNHCNHCCTCCCTT | 1668 | 2292 |
| 33_13_0_9 | CCTCCCTTWCACTTTTGGCGGAGGGACCAAG | WCACT | | |
| VK1- | CCTGAAGATATTGCAACATATTACTGTCAGCAGTACNHCAA | CAGCAGTACNHCAATYWCCCTT | 1669 | 2293 |
| 33_14_0_9 | TYWCCCTTWCACTTTTGGCGGAGGGACCAAG | WCACT | | |
| VK1- | CCTGAAGATATTGCAACATATTACTGTCAGCAGTACGATNH | CAGCAGTACGATNHCYWCCCTT | 1670 | 2294 |
| 33_15_0_9 | CYWCCCTTWCACTTTTGGCGGAGGGACCAAG | WCACT | | |
| VK1-33_2_0_9 | CCTGAAGATATTGCAACATATTACTGTSWMCAGBHCGATAA | SWMCAGBHCGATAATCTCCCTT | 1671 | 2295 |
| | TCTCCCTTWCACTTTTGGCGGAGGGACCAAG | WCACT | | |
| VK1-33_3_0_9 | CCTGAAGATATTGCAACATATTACTGTSWMCAGTACNHCAA | SWMCAGTACNHCAATCTCCCTT | 1672 | 2296 |
| | TCTCCCTTWCACTTTTGGCGGAGGGACCAAG | WCACT | | |
| VK1-33_4_0_9 | CCTGAAGATATTGCAACATATTACTGTSWMCAGTACGATNH | SWMCAGTACGATNHCCTCCCTT | 1673 | 2297 |
| | CCTCCCTTWCACTTTTGGCGGAGGGACCAAG | WCACT | | |
| VK1-33_5_0_9 | CCTGAAGATATTGCAACATATTACTGTSWMCAGTACGATAA | SWMCAGTACGATAATYWCCCTT | 1674 | 2298 |
| | TYWCCCTTWCACTTTTGGCGGAGGGACCAAG | WCACT | | |
| VK1-33_6_0_9 | CCTGAAGATATTGCAACATATTACTGTCAGSWMBHCGATAA | CAGSWMBHCGATAATCTCCCTT | 1675 | 2299 |
| | TCTCCCTTWCACTTTTGGCGGAGGGACCAAG | WCACT | | |
| VK1-33_7_0_9 | CCTGAAGATATTGCAACATATTACTGTCAGSWMTACNHCAA | CAGSWMTACNHCAATCTCCCTT | 1676 | 2300 |
| | TCTCCCTTWCACTTTTGGCGGAGGGACCAAG | WCACT | | |
| VK1-33_8_0_9 | CCTGAAGATATTGCAACATATTACTGTCAGSWMTACGATNH | CAGSWMTACGATNHCCTCCCTT | 1677 | 2301 |
| | CCTCCCTTWCACTTTTGGCGGAGGGACCAAG | WCACT | | |
| VK1-33_9_0_9 | CCTGAAGATATTGCAACATATTACTGTCAGSWMTACGATAA | CAGSWMTACGATAATYWCCCTT | 1678 | 2302 |
| | TYWCCCTTWCACTTTTGGCGGAGGGACCAAG | WCACT | | |
| VK1-33_1_1_9 | CCTGAAGATATTGCAACATATTACTGTSWMSWMTACGATAA | SWMSWMTACGATAATCTCCCTM | 1679 | 2303 |
| | TCTCCCTMTCACTTTTGGCGGAGGGACCAAG | TCACT | | |
| VK1- | CCTGAAGATATTGCAACATATTACTGTCAGCAGBHCNHCAA | CAGCAGBHCNHCAATCTCCCTM | 1680 | 2304 |
| 33_10_1_9 | TCTCCCTMTCACTTTTGGCGGAGGGACCAAG | TCACT | | |
| VK1- | CCTGAAGATATTGCAACATATTACTGTCAGCAGBHCGATNH | CAGCAGBHCGATNHCCTCCCTM | 1681 | 2305 |
| 33_11_1_9 | CCTCCCTMTCACTTTTGGCGGAGGGACCAAG | TCACT | | |
| VK1- | CCTGAAGATATTGCAACATATTACTGTCAGCAGBHCGATAA | CAGCAGBHCGATAATYWCCCTM | 1682 | 2306 |
| 33_12_1_9 | TYWCCCTMTCACTTTTGGCGGAGGGACCAAG | TCACT | | |
| VK1- | CCTGAAGATATTGCAACATATTACTGTCAGCAGTACNHCNH | CAGCAGTACNHCNHCCTCCCTM | 1683 | 2307 |
| 33_13_1_9 | CCTCCCTMTCACTTTTGGCGGAGGGACCAAG | TCACT | | |
| VK1- | CCTGAAGATATTGCAACATATTACTGTCAGCAGTACNHCAA | CAGCAGTACNHCAATYWCCCTM | 1684 | 2308 |
| 33_14_1_9 | TYWCCCTMTCACTTTTGGCGGAGGGACCAAG | TCACT | | |
| VK1- | CCTGAAGATATTGCAACATATTACTGTCAGCAGTACGATNH | CAGCAGTACGATNHCYWCCCTM | 1685 | 2309 |
| 33_15_1_9 | CYWCCCTMTCACTTTTGGCGGAGGGACCAAG | TCACT | | |
| VK1-33_2_1_9 | CCTGAAGATATTGCAACATATTACTGTSWMCAGBHCGATAA | SWMCAGBHCGATAATCTCCCTM | 1686 | 2310 |
| | TCTCCCTMTCACTTTTGGCGGAGGGACCAAG | TCACT | | |
| VK1-33_3_1_9 | CCTGAAGATATTGCAACATATTACTGTSWMCAGTACNHCAA | SWMCAGTACNHCAATCTCCCTM | 1687 | 2311 |
| | TCTCCCTMTCACTTTTGGCGGAGGGACCAAG | TCACT | | |
| VK1-33_4_1_9 | CCTGAAGATATTGCAACATATTACTGTSWMCAGTACGATNH | SWMCAGTACGATNHCCTCCCTM | 1688 | 2312 |
| | CCTCCCTMTCACTTTTGGCGGAGGGACCAAG | TCACT | | |
| VK1-33_5_1_9 | CCTGAAGATATTGCAACATATTACTGTSWMCAGTACGATAA | SWMCAGTACGATAATYWCCCTM | 1689 | 2313 |
| | TYWCCCTMTCACTTTTGGCGGAGGGACCAAG | TCACT | | |
| VK1-33_6_1_9 | CCTGAAGATATTGCAACATATTACTGTCAGSWMBHCGATAA | CAGSWMBHCGATAATCTCCCTM | 1690 | 2314 |
| | TCTCCCTMTCACTTTTGGCGGAGGGACCAAG | TCACT | | |
| VK1-33_7_1_9 | CCTGAAGATATTGCAACATATTACTGTCAGSWMTACNHCAA | CAGSWMTACNHCAATCTCCCTM | 1691 | 2315 |
| | TCTCCCTMTCACTTTTGGCGGAGGGACCAAG | TCACT | | |
| VK1-33_8_1_9 | CCTGAAGATATTGCAACATATTACTGTCAGSWMTACGATNH | CAGSWMTACGATNHCCTCCCTM | 1692 | 2316 |
| | CCTCCCTMTCACTTTTGGCGGAGGGACCAAG | TCACT | | |
| VK1-33_9_1_9 | CCTGAAGATATTGCAACATATTACTGTCAGSWMTACGATAA | CAGSWMTACGATAATYWCCCTM | 1693 | 2317 |
| | TYWCCCTMTCACTTTTGGCGGAGGGACCAAG | TCACT | | |
| VK1-33_1_2_9 | CCTGAAGATATTGCAACATATTACTGTSWMSWMTACGATAA | SWMSWMTACGATAATCTCCCTW | 1694 | 2318 |
| | TCTCCCTWGGACTTTTGGCGGAGGGACCAAG | GGACT | | |
| VK1- | CCTGAAGATATTGCAACATATTACTGTCAGCAGBHCNHCAA | CAGCAGBHCNHCAATCTCCCTW | 1695 | 2319 |
| 33_10_2_9 | TCTCCCTWGGACTTTTGGCGGAGGGACCAAG | GGACT | | |
| VK1- | CCTGAAGATATTGCAACATATTACTGTCAGCAGBHCGATNH | CAGCAGBHCGATNHCCTCCCTW | 1696 | 2320 |
| 33_11_2_9 | CCTCCCTWGGACTTTTGGCGGAGGGACCAAG | GGACT | | |
| VK1- | CCTGAAGATATTGCAACATATTACTGTCAGCAGBHCGATAA | CAGCAGBHCGATAATYWCCCTW | 1697 | 2321 |
| 33_12_2_9 | TYWCCCTWGGACTTTTGGCGGAGGGACCAAG | GGACT | | |
| VK1- | CCTGAAGATATTGCAACATATTACTGTCAGCAGTACNHCNH | CAGCAGTACNHCNHCCTCCCTW | 1698 | 2322 |
| 33_13_2_9 | CCTCCCTWGGACTTTTGGCGGAGGGACCAAG | GGACT | | |
| VK1- | CCTGAAGATATTGCAACATATTACTGTCAGCAGTACNHCAA | CAGCAGTACNHCAATYWCCCTW | 1699 | 2323 |
| 33_14_2_9 | TYWCCCTWGGACTTTTGGCGGAGGGACCAAG | GGACT | | |
| VK1- | CCTGAAGATATTGCAACATATTACTGTCAGCAGTACGATNH | CAGCAGTACGATNHCYWCCCTW | 1700 | 2324 |
| 33_15_2_9 | CYWCCCTWGGACTTTTGGCGGAGGGACCAAG | GGACT | | |
| VK1-33_2_2_9 | CCTGAAGATATTGCAACATATTACTGTSWMCAGBHCGATAA | SWMCAGBHCGATAATCTCCCTW | 1701 | 2325 |
| | TCTCCCTWGGACTTTTGGCGGAGGGACCAAG | GGACT | | |
| VK1-33_3_2_9 | CCTGAAGATATTGCAACATATTACTGTSWMCAGTACNHCAA | SWMCAGTACNHCAATCTCCCTW | 1702 | 2326 |
| | TCTCCCTWGGACTTTTGGCGGAGGGACCAAG | GGACT | | |
| VK1-33_4_2_9 | CCTGAAGATATTGCAACATATTACTGTSWMCAGTACGATNH | SWMCAGTACGATNHCCTCCCTW | 1703 | 2327 |
| | CCTCCCTWGGACTTTTGGCGGAGGGACCAAG | GGACT | | |
| VK1-33_5_2_9 | CCTGAAGATATTGCAACATATTACTGTSWMCAGTACGATAA | SWMCAGTACGATAATYWCCCTW | 1704 | 2328 |
| | TYWCCCTWGGACTTTTGGCGGAGGGACCAAG | GGACT | | |
| VK1-33_6_2_9 | CCTGAAGATATTGCAACATATTACTGTCAGSWMBHCGATAA | CAGSWMBHCGATAATCTCCCTW | 1705 | 2329 |
| | TCTCCCTWGGACTTTTGGCGGAGGGACCAAG | GGACT | | |
| VK1-33_7_2_9 | CCTGAAGATATTGCAACATATTACTGTCAGSWMTACNHCAA | CAGSWMTACNHCAATCTCCCTW | 1706 | 2330 |
| | TCTCCCTWGGACTTTTGGCGGAGGGACCAAG | GGACT | | |
| VK1-33_8_2_9 | CCTGAAGATATTGCAACATATTACTGTCAGSWMTACGATNH | CAGSWMTACGATNHCCTCCCTW | 1707 | 2331 |
| | CCTCCCTWGGACTTTTGGCGGAGGGACCAAG | GGACT | | |
| VK1-33_9_2_9 | CCTGAAGATATTGCAACATATTACTGTCAGSWMTACGATAA | CAGSWMTACGATAATYWCCCTW | 1708 | 2332 |
| | TYWCCCTWGGACTTTTGGCGGAGGGACCAAG | GGACT | | |
| VK1-33_1_3_9 | CCTGAAGATATTGCAACATATTACTGTSWMSWMTACGATAA | SWMSWMTACGATAATCTCCCTC | 1709 | 2333 |
| | TCTCCCTCCTACTTTTGGCGGAGGGACCAAG | CTACT | | |
| VK1- | CCTGAAGATATTGCAACATATTACTGTCAGCAGBHCNHCAA | CAGCAGBHCNHCAATCTCCCTC | 1710 | 2334 |
| 33_10_3_9 | TCTCCCTCCTACTTTTGGCGGAGGGACCAAG | CTACT | | |
| VK1- | CCTGAAGATATTGCAACATATTACTGTCAGCAGBHCGATNH | CAGCAGBHCGATNHCCTCCCTC | 1711 | 2335 |
| 33_11_3_9 | CCTCCCTCCTACTTTTGGCGGAGGGACCAAG | CTACT | | |
| VK1- | CCTGAAGATATTGCAACATATTACTGTCAGCAGBHCGATAA | CAGCAGBHCGATAATYWCCCTC | 1712 | 2336 |
| 33_12_3_9 | TYWCCCTCCTACTTTTGGCGGAGGGACCAAG | CTACT | | |
| VK1- | CCTGAAGATATTGCAACATATTACTGTCAGCAGTACNHCNH | CAGCAGTACNHCNHCCTCCCTC | 1713 | 2337 |
| 33_13_3_9 | CCTCCCTCCTACTTTTGGCGGAGGGACCAAG | CTACT | | |
| VK1- | CCTGAAGATATTGCAACATATTACTGTCAGCAGTACNHCAA | CAGCAGTACNHCAATYWCCCTC | 1714 | 2338 |
| 33_14_3_9 | TYWCCCTCCTACTTTTGGCGGAGGGACCAAG | CTACT | | |
| VK1- | CCTGAAGATATTGCAACATATTACTGTCAGCAGTACGATNH | CAGCAGTACGATNHCYWCCCTC | 1715 | 2339 |
| 33_15_3_9 | CYWCCCTCCTACTTTTGGCGGAGGGACCAAG | CTACT | | |
| VK1-33_2_3_9 | CCTGAAGATATTGCAACATATTACTGTSWMCAGBHCGATAA | SWMCAGBHCGATAATCTCCCTC | 1716 | 2340 |
| | TCTCCCTCCTACTTTTGGCGGAGGGACCAAG | CTACT | | |
| VK1-33_3_3_9 | CCTGAAGATATTGCAACATATTACTGTSWMCAGTACNHCAA | SWMCAGTACNHCAATCTCCCTC | 1717 | 2341 |
| | TCTCCCTCCTACTTTTGGCGGAGGGACCAAG | CTACT | | |
| VK1-33_4_3_9 | CCTGAAGATATTGCAACATATTACTGTSWMCAGTACGATNH | SWMCAGTACGATNHCCTCCCTC | 1718 | 2342 |
| | CCTCCCTCCTACTTTTGGCGGAGGGACCAAG | CTACT | | |
| VK1-33_5_3_9 | CCTGAAGATATTGCAACATATTACTGTSWMCAGTACGATAA | SWMCAGTACGATAATYWCCCTC | 1719 | 2343 |
| | TYWCCCTCCTACTTTTGGCGGAGGGACCAAG | CTACT | | |
| VK1-33_6_3_9 | CCTGAAGATATTGCAACATATTACTGTCAGSWMBHCGATAA | CAGSWMBHCGATAATCTCCCTC | 1720 | 2344 |
| | TCTCCCTCCTACTTTTGGCGGAGGGACCAAG | CTACT | | |
| VK1-33_7_3_9 | CCTGAAGATATTGCAACATATTACTGTCAGSWMTACNHCAA | CAGSWMTACNHCAATCTCCCTC | 1721 | 2345 |
| | TCTCCCTCCTACTTTTGGCGGAGGGACCAAG | CTACT | | |
| VK1-33_8_3_9 | CCTGAAGATATTGCAACATATTACTGTCAGSWMTACGATNH | CAGSWMTACGATNHCCTCCCTC | 1722 | 2346 |
| | CCTCCCTCCTACTTTTGGCGGAGGGACCAAG | CTACT | | |
| VK1-33_9_3_9 | CCTGAAGATATTGCAACATATTACTGTCAGSWMTACGATAA | CAGSWMTACGATAATYWCCCTC | 1723 | 2347 |
| | TYWCCCTCCTACTTTTGGCGGAGGGACCAAG | CTACT | | |
| VK1-39_1_0_9 | CCTGAAGATTTTGCAACTTACTACTGTSWMSWMAGCTACAG | SWMSWMAGCTACAGTACTCCTT | 1724 | 305 |
| | TACTCCTTWCACTTTTGGCGGAGGGACCAAG | WCACT | | |
| VK1- | CCTGAAGATTTTGCAACTTACTACTGTCAGCAAVNABHCAG | CAGCAAVNABHCAGTACTCCTT | 1725 | 314 |
| 39_10_0_9 | TACTCCTTWCACTTTTGGCGGAGGGACCAAG | WCACT | | |
| VK1- | CCTGAAGATTTTGCAACTTACTACTGTCAGCAAVNATACNH | CAGCAAVNATACNHCACTCCTT | 1726 | 315 |
| 39_11_0_9 | CACTCCTTWCACTTTTGGCGGAGGGACCAAG | WCACT | | |
| VK1- | CCTGAAGATTTTGCAACTTACTACTGTCAGCAAVNATACAG | CAGCAAVNATACAGTBHCCCTT | 1727 | 316 |
| 39_12_0_9 | TBHCCCTTWCACTTTTGGCGGAGGGACCAAG | WCACT | | |
| VK1- | CCTGAAGATTTTGCAACTTACTACTGTCAGCAAAGCBHCNH | CAGCAAAGCBHCNHCACTCCTT | 1728 | 317 |
| 39_13_0_9 | CACTCCTTWCACTTTTGGCGGAGGGACCAAG | WCACT | | |
| VK1- | CCTGAAGATTTTGCAACTTACTACTGTCAGCAAAGCBHCAG | CAGCAAAGCBHCAGTBHCCCTT | 1729 | 318 |
| 39_14_0_9 | TBHCCCTTWCACTTTTGGCGGAGGGACCAAG | WCACT | | |
| VK1- | CCTGAAGATTTTGCAACTTACTACTGTCAGCAAAGCTACNH | CAGCAAAGCTACNHCBHCCCTT | 1730 | 319 |
| 39_15_0_9 | CBHCCCTTWCACTTTTGGCGGAGGGACCAAG | WCACT | | |
| VK1-39_2_0_9 | CCTGAAGATTTTGCAACTTACTACTGTSWMCAAVNATACAG | SWMCAAVNATACAGTACTCCTT | 1731 | 306 |
| | TACTCCTTWCACTTTTGGCGGAGGGACCAAG | WCACT | | |
| VK1-39_3_0_9 | CCTGAAGATTTTGCAACTTACTACTGTSWMCAAAGCBHCAG | SWMCAAAGCBHCAGTACTCCTT | 1732 | 307 |
| | TACTCCTTWCACTTTTGGCGGAGGGACCAAG | WCACT | | |
| VK1-39_4_0_9 | CCTGAAGATTTTGCAACTTACTACTGTSWMCAAAGCTACNH | SWMCAAAGCTACNHCACTCCTT | 1733 | 308 |
| | CACTCCTTWCACTTTTGGCGGAGGGACCAAG | WCACT | | |
| VK1-39_5_0_9 | CCTGAAGATTTTGCAACTTACTACTGTSWMCAAAGCTACAG | SWMCAAAGCTACAGTBHCCCTT | 1734 | 309 |
| | TBHCCCTTWCACTTTTGGCGGAGGGACCAAG | WCACT | | |
| VK1-39_6_0_9 | CCTGAAGATTTTGCAACTTACTACTGTCAGSWMVNATACAG | CAGSWMVNATACAGTACTCCTT | 1735 | 310 |
| | TACTCCTTWCACTTTTGGCGGAGGGACCAAG | WCACT | | |
| VK1-39_7_0_9 | CCTGAAGATTTTGCAACTTACTACTGTCAGSWMAGCBHCAG | CAGSWMAGCBHCAGTACTCCTT | 1736 | 311 |
| | TACTCCTTWCACTTTTGGCGGAGGGACCAAG | WCACT | | |
| VK1-39_8_0_9 | CCTGAAGATTTTGCAACTTACTACTGTCAGSWMAGCTACNH | CAGSWMAGCTACNHCACTCCTT | 1737 | 312 |
| | CACTCCTTWCACTTTTGGCGGAGGGACCAAG | WCACT | | |
| VK1-39_9_0_9 | CCTGAAGATTTTGCAACTTACTACTGTCAGSWMAGCTACAG | CAGSWMAGCTACAGTBHCCCTT | 1738 | 313 |
| | TBHCCCTTWCACTTTTGGCGGAGGGACCAAG | WCACT | | |
| VK1-39_1_1_9 | CCTGAAGATTTTGCAACTTACTACTGTSWMSWMAGCTACAG | SWMSWMAGCTACAGTACTCCTM | 1739 | 2348 |
| | TACTCCTMTCACTTTTGGCGGAGGGACCAAG | TCACT | | |
| VK1- | CCTGAAGATTTTGCAACTTACTACTGTCAGCAAVNABHCAG | CAGCAAVNABHCAGTACTCCTM | 1740 | 2349 |
| 39_10_1_9 | TACTCCTMTCACTTTTGGCGGAGGGACCAAG | TCACT | | |
| VK1- | CCTGAAGATTTTGCAACTTACTACTGTCAGCAAVNATACNH | CAGCAAVNATACNHCACTCCTM | 1741 | 2350 |
| 39_11_1_9 | CACTCCTMTCACTTTTGGCGGAGGGACCAAG | TCACT | | |
| VK1- | CCTGAAGATTTTGCAACTTACTACTGTCAGCAAVNATACAG | CAGCAAVNATACAGTBHCCCTM | 1742 | 2351 |
| 39_12_1_9 | TBHCCCTMTCACTTTTGGCGGAGGGACCAAG | TCACT | | |
| VK1- | CCTGAAGATTTTGCAACTTACTACTGTCAGCAAAGCBHCNH | CAGCAAAGCBHCNHCACTCCTM | 1743 | 2352 |
| 39_13_1_9 | CACTCCTMTCACTTTTGGCGGAGGGACCAAG | TCACT | | |
| VK1- | CCTGAAGATTTTGCAACTTACTACTGTCAGCAAAGCBHCAG | CAGCAAAGCBHCAGTBHCCCTM | 1744 | 2353 |
| 39_14_1_9 | TBHCCCTMTCACTTTTGGCGGAGGGACCAAG | TCACT | | |
| VK1- | CCTGAAGATTTTGCAACTTACTACTGTCAGCAAAGCTACNH | CAGCAAAGCTACNHCBHCCCTM | 1745 | 2354 |
| 39_15_1_9 | CBHCCCTMTCACTTTTGGCGGAGGGACCAAG | TCACT | | |
| VK1-39_2_1_9 | CCTGAAGATTTTGCAACTTACTACTGTSWMCAAVNATACAG | SWMCAAVNATACAGTACTCCTM | 1746 | 2355 |
| | TACTCCTMTCACTTTTGGCGGAGGGACCAAG | TCACT | | |
| VK1-39_3_1_9 | CCTGAAGATTTTGCAACTTACTACTGTSWMCAAAGCBHCAG | SWMCAAAGCBHCAGTACTCCTM | 1747 | 2356 |
| | TACTCCTMTCACTTTTGGCGGAGGGACCAAG | TCACT | | |
| VK1-39_4_1_9 | CCTGAAGATTTTGCAACTTACTACTGTSWMCAAAGCTACNH | SWMCAAAGCTACNHCACTCCTM | 1748 | 2357 |
| | CACTCCTMTCACTTTTGGCGGAGGGACCAAG | TCACT | | |
| VK1-39_5_1_9 | CCTGAAGATTTTGCAACTTACTACTGTSWMCAAAGCTACAG | SWMCAAAGCTACAGTBHCCCTM | 1749 | 2358 |
| | TBHCCCTMTCACTTTTGGCGGAGGGACCAAG | TCACT | | |
| VK1-39_6_1_9 | CCTGAAGATTTTGCAACTTACTACTGTCAGSWMVNATACAG | CAGSWMVNATACAGTACTCCTM | 1750 | 2359 |
| | TACTCCTMTCACTTTTGGCGGAGGGACCAAG | TCACT | | |
| VK1-39_7_1_9 | CCTGAAGATTTTGCAACTTACTACTGTCAGSWMAGCBHCAG | CAGSWMAGCBHCAGTACTCCTM | 1751 | 2360 |
| | TACTCCTMTCACTTTTGGCGGAGGGACCAAG | TCACT | | |
| VK1-39_8_1_9 | CCTGAAGATTTTGCAACTTACTACTGTCAGSWMAGCTACNH | CAGSWMAGCTACNHCACTCCTM | 1752 | 2361 |
| | CACTCCTMTCACTTTTGGCGGAGGGACCAAG | TCACT | | |
| VK1-39_9_1_9 | CCTGAAGATTTTGCAACTTACTACTGTCAGSWMAGCTACAG | CAGSWMAGCTACAGTBHCCCTM | 1753 | 2362 |
| | TBHCCCTMTCACTTTTGGCGGAGGGACCAAG | TCACT | | |
| VK1-39_1_2_9 | CCTGAAGATTTTGCAACTTACTACTGTSWMSWMAGCTACAG | SWMSWMAGCTACAGTACTCCTW | 1754 | 2363 |
| | TACTCCTWGGACTTTTGGCGGAGGGACCAAG | GGACT | | |
| VK1- | CCTGAAGATTTTGCAACTTACTACTGTCAGCAAVNABHCAG | CAGCAAVNABHCAGTACTCCTW | 1755 | 2364 |
| 39_10_2_9 | TACTCCTWGGACTTTTGGCGGAGGGACCAAG | GGACT | | |
| VK1- | CCTGAAGATTTTGCAACTTACTACTGTCAGCAAVNATACNH | CAGCAAVNATACNHCACTCCTW | 1756 | 2365 |
| 39_11_2_9 | CACTCCTWGGACTTTTGGCGGAGGGACCAAG | GGACT | | |
| VK1- | CCTGAAGATTTTGCAACTTACTACTGTCAGCAAVNATACAG | CAGCAAVNATACAGTBHCCCTW | 1757 | 2366 |
| 39_12_2_9 | TBHCCCTWGGACTTTTGGCGGAGGGACCAAG | GGACT | | |
| VK1- | CCTGAAGATTTTGCAACTTACTACTGTCAGCAAAGCBHCNH | CAGCAAAGCBHCNHCACTCCTW | 1758 | 2367 |
| 39_13_2_9 | CACTCCTWGGACTTTTGGCGGAGGGACCAAG | GGACT | | |
| VK1- | CCTGAAGATTTTGCAACTTACTACTGTCAGCAAAGCBHCAG | CAGCAAAGCBHCAGTBHCCCTW | 1759 | 2368 |
| 39_14_2_9 | TBHCCCTWGGACTTTTGGCGGAGGGACCAAG | GGACT | | |
| VK1- | CCTGAAGATTTTGCAACTTACTACTGTCAGCAAAGCTACNH | CAGCAAAGCTACNHCBHCCCTW | 1760 | 2369 |
| 39_15_2_9 | CBHCCCTWGGACTTTTGGCGGAGGGACCAAG | GGACT | | |
| VK1-39_2_2_9 | CCTGAAGATTTTGCAACTTACTACTGTSWMCAAVNATACAG | SWMCAAVNATACAGTACTCCTW | 1761 | 2370 |
| | TACTCCTWGGACTTTTGGCGGAGGGACCAAG | GGACT | | |
| VK1-39_3_2_9 | CCTGAAGATTTTGCAACTTACTACTGTSWMCAAAGCBHCAG | SWMCAAAGCBHCAGTACTCCTW | 1762 | 2371 |
| | TACTCCTWGGACTTTTGGCGGAGGGACCAAG | GGACT | | |
| VK1-39_4_2_9 | CCTGAAGATTTTGCAACTTACTACTGTSWMCAAAGCTACNH | SWMCAAAGCTACNHCACTCCTW | 1763 | 2372 |
| | CACTCCTWGGACTTTTGGCGGAGGGACCAAG | GGACT | | |
| VK1-39_5_2_9 | CCTGAAGATTTTGCAACTTACTACTGTSWMCAAAGCTACAG | SWMCAAAGCTACAGTBHCCCTW | 1764 | 2373 |
| | TBHCCCTWGGACTTTTGGCGGAGGGACCAAG | GGACT | | |
| VK1-39_6_2_9 | CCTGAAGATTTTGCAACTTACTACTGTCAGSWMVNATACAG | CAGSWMVNATACAGTACTCCTW | 1765 | 2374 |
| | TACTCCTWGGACTTTTGGCGGAGGGACCAAG | GGACT | | |
| VK1-39_7_2_9 | CCTGAAGATTTTGCAACTTACTACTGTCAGSWMAGCBHCAG | CAGSWMAGCBHCAGTACTCCTW | 1766 | 2375 |
| | TACTCCTWGGACTTTTGGCGGAGGGACCAAG | GGACT | | |
| VK1-39_8_2_9 | CCTGAAGATTTTGCAACTTACTACTGTCAGSWMAGCTACNH | CAGSWMAGCTACNHCACTCCTW | 1767 | 2376 |
| | CACTCCTWGGACTTTTGGCGGAGGGACCAAG | GGACT | | |
| VK1-39_9_2_9 | CCTGAAGATTTTGCAACTTACTACTGTCAGSWMAGCTACAG | CAGSWMAGCTACAGTBHCCCTW | 1768 | 2377 |
| | TBHCCCTWGGACTTTTGGCGGAGGGACCAAG | GGACT | | |
| VK1-39_1_3_9 | CCTGAAGATTTTGCAACTTACTACTGTSWMSWMAGCTACAG | SWMSWMAGCTACAGTACTCCTC | 1769 | 2378 |
| | TACTCCTCCTACTTTTGGCGGAGGGACCAAG | CTACT | | |
| VK1- | CCTGAAGATTTTGCAACTTACTACTGTCAGCAAVNABHCAG | CAGCAAVNABHCAGTACTCCTC | 1770 | 2379 |
| 39_10_3_9 | TACTCCTCCTACTTTTGGCGGAGGGACCAAG | CTACT | | |
| VK1- | CCTGAAGATTTTGCAACTTACTACTGTCAGCAAVNATACNH | CAGCAAVNATACNHCACTCCTC | 1771 | 2380 |
| 39_11_3_9 | CACTCCTCCTACTTTTGGCGGAGGGACCAAG | CTACT | | |
| VK1- | CCTGAAGATTTTGCAACTTACTACTGTCAGCAAVNATACAG | CAGCAAVNATACAGTBHCCCTC | 1772 | 2381 |
| 39_12_3_9 | TBHCCCTCCTACTTTTGGCGGAGGGACCAAG | CTACT | | |
| VK1- | CCTGAAGATTTTGCAACTTACTACTGTCAGCAAAGCBHCNH | CAGCAAAGCBHCNHCACTCCTC | 1773 | 2382 |
| 39_13_3_9 | CACTCCTCCTACTTTTGGCGGAGGGACCAAG | CTACT | | |
| VK1- | CCTGAAGATTTTGCAACTTACTACTGTCAGCAAAGCBHCAG | CAGCAAAGCBHCAGTBHCCCTC | 1774 | 2383 |
| 39_14_3_9 | TBHCCCTCCTACTTTTGGCGGAGGGACCAAG | CTACT | | |
| VK1- | CCTGAAGATTTTGCAACTTACTACTGTCAGCAAAGCTACNH | CAGCAAAGCTACNHCBHCCCTC | 1775 | 2384 |
| 39_15_3_9 | CBHCCCTCCTACTTTTGGCGGAGGGACCAAG | CTACT | | |
| VK1-39_2_3_9 | CCTGAAGATTTTGCAACTTACTACTGTSWMCAAVNATACAG | SWMCAAVNATACAGTACTCCTC | 1776 | 2385 |
| | TACTCCTCCTACTTTTGGCGGAGGGACCAAG | CTACT | | |
| VK1-39_3_3_9 | CCTGAAGATTTTGCAACTTACTACTGTSWMCAAAGCBHCAG | SWMCAAAGCBHCAGTACTCCTC | 1777 | 2386 |
| | TACTCCTCCTACTTTTGGCGGAGGGACCAAG | CTACT | | |
| VK1-39_4_3_9 | CCTGAAGATTTTGCAACTTACTACTGTSWMCAAAGCTACNH | SWMCAAAGCTACNHCACTCCTC | 1778 | 2387 |
| | CACTCCTCCTACTTTTGGCGGAGGGACCAAG | CTACT | | |
| VK1-39_5_3_9 | CCTGAAGATTTTGCAACTTACTACTGTSWMCAAAGCTACAG | SWMCAAAGCTACAGTBHCCCTC | 1779 | 2388 |
| | TBHCCCTCCTACTTTTGGCGGAGGGACCAAG | CTACT | | |
| VK1-39_6_3_9 | CCTGAAGATTTTGCAACTTACTACTGTCAGSWMVNATACAG | CAGSWMVNATACAGTACTCCTC | 1780 | 2389 |
| | TACTCCTCCTACTTTTGGCGGAGGGACCAAG | CTACT | | |
| VK1-39_7_3_9 | CCTGAAGATTTTGCAACTTACTACTGTCAGSWMAGCBHCAG | CAGSWMAGCBHCAGTACTCCTC | 1781 | 2390 |
| | TACTCCTCCTACTTTTGGCGGAGGGACCAAG | CTACT | | |
| VK1-39_8_3_9 | CCTGAAGATTTTGCAACTTACTACTGTCAGSWMAGCTACNH | CAGSWMAGCTACNHCACTCCTC | 1782 | 2391 |
| | CACTCCTCCTACTTTTGGCGGAGGGACCAAG | CTACT | | |
| VK1-39_9_3_9 | CCTGAAGATTTTGCAACTTACTACTGTCAGSWMAGCTACAG | CAGSWMAGCTACAGTBHCCCTC | 1783 | 2392 |
| | TBHCCCTCCTACTTTTGGCGGAGGGACCAAG | CTACT | | |
| VK2-28_1_0_9 | GCTGAGGATGTTGGGGTTTATTACTGCDTSSWMGCACTCCA | DTSSWMGCACTCCAGACTCCTT | 1784 | 2393 |
| | GACTCCTTWCACTTTTGGCGGAGGGACCAAG | WCACT | | |
| VK2- | GCTGAGGATGTTGGGGTTTATTACTGCATGCAGVNAMNACA | ATGCAGVNAMNACAGACTCCTT | 1785 | 2394 |
| 28_10_0_9 | GACTCCTTWCACTTTTGGCGGAGGGACCAAG | WCACT | | |
| VK2- | GCTGAGGATGTTGGGGTTTATTACTGCATGCAGVNACTCSR | ATGCAGVNACTCSRMACTCCTT | 1786 | 2395 |
| 28_11_0_9 | MACTCCTTWCACTTTTGGCGGAGGGACCAAG | WCACT | | |
| VK2- | GCTGAGGATGTTGGGGTTTATTACTGCATGCAGVNACTCCA | ATGCAGVNACTCCAGVBCCCTT | 1787 | 2396 |
| 28_12_0_9 | GVBCCCTTWCACTTTTGGCGGAGGGACCAAG | WCACT | | |
| VK2- | GCTGAGGATGTTGGGGTTTATTACTGCATGCAGGCAMNASR | ATGCAGGCAMNASRMACTCCTT | 1788 | 2397 |
| 28_13_0_9 | MACTCCTTWCACTTTTGGCGGAGGGACCAAG | WCACT | | |
| VK2- | GCTGAGGATGTTGGGGTTTATTACTGCATGCAGGCAMNACA | ATGCAGGCAMNACAGVBCCCTT | 1789 | 2398 |
| 28_14_0_9 | GVBCCCTTWCACTTTTGGCGGAGGGACCAAG | WCACT | | |
| VK2- | GCTGAGGATGTTGGGGTTTATTACTGCATGCAGGCACTCSR | ATGCAGGCACTCSRMVBCCCTT | 1790 | 2399 |
| 28_15_0_9 | MVBCCCTTWCACTTTTGGCGGAGGGACCAAG | WCACT | | |
| VK2-28_2_0_9 | GCTGAGGATGTTGGGGTTTATTACTGCDTSCAGVNACTCCA | DTSCAGVNACTCCAGACTCCTT | 1791 | 2400 |
| | GACTCCTTWCACTTTTGGCGGAGGGACCAAG | WCACT | | |
| VK2-28_3_0_9 | GCTGAGGATGTTGGGGTTTATTACTGCDTSCAGGCAMNACA | DTSCAGGCAMNACAGACTCCTT | 1792 | 2401 |
| | GACTCCTTWCACTTTTGGCGGAGGGACCAAG | WCACT | | |
| VK2-28_4_0_9 | GCTGAGGATGTTGGGGTTTATTACTGCDTSCAGGCACTCSR | DTSCAGGCACTCSRMACTCCTT | 1793 | 2402 |
| | MACTCCTTWCACTTTTGGCGGAGGGACCAAG | WCACT | | |
| VK2-28_5_0_9 | GCTGAGGATGTTGGGGTTTATTACTGCDTSCAGGCACTCCA | DTSCAGGCACTCCAGVBCCCTT | 1794 | 2403 |
| | GVBCCCTTWCACTTTTGGCGGAGGGACCAAG | WCACT | | |
| VK2-28_6_0_9 | GCTGAGGATGTTGGGGTTTATTACTGCATGSWMVNACTCCA | ATGSWMVNACTCCAGACTCCTT | 1795 | 2404 |
| | GACTCCTTWCACTTTTGGCGGAGGGACCAAG | WCACT | | |
| VK2-28_7_0_9 | GCTGAGGATGTTGGGGTTTATTACTGCATGSWMGCAMNACA | ATGSWMGCAMNACAGACTCCTT | 1796 | 2405 |
| | GACTCCTTWCACTTTTGGCGGAGGGACCAAG | WCACT | | |
| VK2-28_8_0_9 | GCTGAGGATGTTGGGGTTTATTACTGCATGSWMGCACTCSR | ATGSWMGCACTCSRMACTCCTT | 1797 | 2406 |
| | MACTCCTTWCACTTTTGGCGGAGGGACCAAG | WCACT | | |
| VK2-28_9_0_9 | GCTGAGGATGTTGGGGTTTATTACTGCATGSWMGCACTCCA | ATGSWMGCACTCCAGVBCCCTT | 1798 | 2407 |
| | GVBCCCTTWCACTTTTGGCGGAGGGACCAAG | WCACT | | |
| VK2-28_1_1_9 | GCTGAGGATGTTGGGGTTTATTACTGCDTSSWMGCACTCCA | DTSSWMGCACTCCAGACTCCTM | 1799 | 2408 |
| | GACTCCTMTCACTTTTGGCGGAGGGACCAAG | TCACT | | |
| VK2- | GCTGAGGATGTTGGGGTTTATTACTGCATGCAGVNAMNACA | ATGCAGVNAMNACAGACTCCTM | 1800 | 2409 |
| 28_10_1_9 | GACTCCTMTCACTTTTGGCGGAGGGACCAAG | TCACT | | |
| VK2- | GCTGAGGATGTTGGGGTTTATTACTGCATGCAGVNACTCSR | ATGCAGVNACTCSRMACTCCTM | 1801 | 2410 |
| 28_11_1_9 | MACTCCTMTCACTTTTGGCGGAGGGACCAAG | TCACT | | |
| VK2- | GCTGAGGATGTTGGGGTTTATTACTGCATGCAGVNACTCCA | ATGCAGVNACTCCAGVBCCCTM | 1802 | 2411 |
| 28_12_1_9 | GVBCCCTMTCACTTTTGGCGGAGGGACCAAG | TCACT | | |
| VK2- | GCTGAGGATGTTGGGGTTTATTACTGCATGCAGGCAMNASR | ATGCAGGCAMNASRMACTCCTM | 1803 | 2412 |
| 28_13_1_9 | MACTCCTMTCACTTTTGGCGGAGGGACCAAG | TCACT | | |
| VK2- | GCTGAGGATGTTGGGGTTTATTACTGCATGCAGGCAMNACA | ATGCAGGCAMNACAGVBCCCTM | 1804 | 2413 |
| 28_14_1_9 | GVBCCCTMTCACTTTTGGCGGAGGGACCAAG | TCACT | | |
| VK2- | GCTGAGGATGTTGGGGTTTATTACTGCATGCAGGCACTCSR | ATGCAGGCACTCSRMVBCCCTM | 1805 | 2414 |
| 28_15_1_9 | MVBCCCTMTCACTTTTGGCGGAGGGACCAAG | TCACT | | |
| VK2-28_2_1_9 | GCTGAGGATGTTGGGGTTTATTACTGCDTSCAGVNACTCCA | DTSCAGVNACTCCAGACTCCTM | 1806 | 2415 |
| | GACTCCTMTCACTTTTGGCGGAGGGACCAAG | TCACT | | |
| VK2-28_3_1_9 | GCTGAGGATGTTGGGGTTTATTACTGCDTSCAGGCAMNACA | DTSCAGGCAMNACAGACTCCTM | 1807 | 2416 |
| | GACTCCTMTCACTTTTGGCGGAGGGACCAAG | TCACT | | |
| VK2-28_4_1_9 | GCTGAGGATGTTGGGGTTTATTACTGCDTSCAGGCACTCSR | DTSCAGGCACTCSRMACTCCTM | 1808 | 2417 |
| | MACTCCTMTCACTTTTGGCGGAGGGACCAAG | TCACT | | |
| VK2-28_5_1_9 | GCTGAGGATGTTGGGGTTTATTACTGCDTSCAGGCACTCCA | DTSCAGGCACTCCAGVBCCCTM | 1809 | 2418 |
| | GVBCCCTMTCACTTTTGGCGGAGGGACCAAG | TCACT | | |
| VK2-28_6_1_9 | GCTGAGGATGTTGGGGTTTATTACTGCATGSWMVNACTCCA | ATGSWMVNACTCCAGACTCCTM | 1810 | 2419 |
| | GACTCCTMTCACTTTTGGCGGAGGGACCAAG | TCACT | | |
| VK2-28_7_1_9 | GCTGAGGATGTTGGGGTTTATTACTGCATGSWMGCAMNACA | ATGSWMGCAMNACAGACTCCTM | 1811 | 2420 |
| | GACTCCTMTCACTTTTGGCGGAGGGACCAAG | TCACT | | |
| VK2-28_8_1_9 | GCTGAGGATGTTGGGGTTTATTACTGCATGSWMGCACTCSR | ATGSWMGCACTCSRMACTCCTM | 1812 | 2421 |
| | MACTCCTMTCACTTTTGGCGGAGGGACCAAG | TCACT | | |
| VK2-28_9_1_9 | GCTGAGGATGTTGGGGTTTATTACTGCATGSWMGCACTCCA | ATGSWMGCACTCCAGVBCCCTM | 1813 | 2422 |
| | GVBCCCTMTCACTTTTGGCGGAGGGACCAAG | TCACT | | |
| VK2-28_1_2_9 | GCTGAGGATGTTGGGGTTTATTACTGCDTSSWMGCACTCCA | DTSSWMGCACTCCAGACTCCTW | 1814 | 2423 |
| | GACTCCTWGGACTTTTGGCGGAGGGACCAAG | GGACT | | |
| VK2- | GCTGAGGATGTTGGGGTTTATTACTGCATGCAGVNAMNACA | ATGCAGVNAMNACAGACTCCTW | 1815 | 2424 |
| 28_10_2_9 | GACTCCTWGGACTTTTGGCGGAGGGACCAAG | GGACT | | |
| VK2- | GCTGAGGATGTTGGGGTTTATTACTGCATGCAGVNACTCSR | ATGCAGVNACTCSRMACTCCTW | 1816 | 2425 |
| 28_11_2_9 | MACTCCTWGGACTTTTGGCGGAGGGACCAAG | GGACT | | |
| VK2- | GCTGAGGATGTTGGGGTTTATTACTGCATGCAGVNACTCCA | ATGCAGVNACTCCAGVBCCCTW | 1817 | 2426 |
| 28_12_2_9 | GVBCCCTWGGACTTTTGGCGGAGGGACCAAG | GGACT | | |
| VK2- | GCTGAGGATGTTGGGGTTTATTACTGCATGCAGGCAMNASR | ATGCAGGCAMNASRMACTCCTW | 1818 | 2427 |
| 28_13_2_9 | MACTCCTWGGACTTTTGGCGGAGGGACCAAG | GGACT | | |
| VK2- | GCTGAGGATGTTGGGGTTTATTACTGCATGCAGGCAMNACA | ATGCAGGCAMNACAGVBCCCTW | 1819 | 2428 |
| 28_14_2_9 | GVBCCCTWGGACTTTTGGCGGAGGGACCAAG | GGACT | | |
| VK2- | GCTGAGGATGTTGGGGTTTATTACTGCATGCAGGCACTCSR | ATGCAGGCACTCSRMVBCCCTW | 1820 | 2429 |
| 28_15_2_9 | MVBCCCTWGGACTTTTGGCGGAGGGACCAAG | GGACT | | |
| VK2-28_2_2_9 | GCTGAGGATGTTGGGGTTTATTACTGCDTSCAGVNACTCCA | DTSCAGVNACTCCAGACTCCTW | 1821 | 2430 |
| | GACTCCTWGGACTTTTGGCGGAGGGACCAAG | GGACT | | |
| VK2-28_3_2_9 | GCTGAGGATGTTGGGGTTTATTACTGCDTSCAGGCAMNACA | DTSCAGGCAMNACAGACTCCTW | 1822 | 2431 |
| | GACTCCTWGGACTTTTGGCGGAGGGACCAAG | GGACT | | |
| VK2-28_4_2_9 | GCTGAGGATGTTGGGGTTTATTACTGCDTSCAGGCACTCSR | DTSCAGGCACTCSRMACTCCTW | 1823 | 2432 |
| | MACTCCTWGGACTTTTGGCGGAGGGACCAAG | GGACT | | |
| VK2-28_5_2_9 | GCTGAGGATGTTGGGGTTTATTACTGCDTSCAGGCACTCCA | DTSCAGGCACTCCAGVBCCCTW | 1824 | 2433 |
| | GVBCCCTWGGACTTTTGGCGGAGGGACCAAG | GGACT | | |
| VK2-28_6_2_9 | GCTGAGGATGTTGGGGTTTATTACTGCATGSWMVNACTCCA | ATGSWMVNACTCCAGACTCCTW | 1825 | 2434 |
| | GACTCCTWGGACTTTTGGCGGAGGGACCAAG | GGACT | | |
| VK2-28_7_2_9 | GCTGAGGATGTTGGGGTTTATTACTGCATGSWMGCAMNACA | ATGSWMGCAMNACAGACTCCTW | 1826 | 2435 |
| | GACTCCTWGGACTTTTGGCGGAGGGACCAAG | GGACT | | |
| VK2-28_8_2_9 | GCTGAGGATGTTGGGGTTTATTACTGCATGSWMGCACTCSR | ATGSWMGCACTCSRMACTCCTW | 1827 | 2436 |
| | MACTCCTWGGACTTTTGGCGGAGGGACCAAG | GGACT | | |
| VK2-28_9_2_9 | GCTGAGGATGTTGGGGTTTATTACTGCATGSWMGCACTCCA | ATGSWMGCACTCCAGVBCCCTW | 1828 | 2437 |
| | GVBCCCTWGGACTTTTGGCGGAGGGACCAAG | GGACT | | |
| VK2-28_1_3_9 | GCTGAGGATGTTGGGGTTTATTACTGCDTSSWMGCACTCCA | DTSSWMGCACTCCAGACTCCTC | 1829 | 2438 |
| | GACTCCTCCTACTTTTGGCGGAGGGACCAAG | CTACT | | |
| VK2- | GCTGAGGATGTTGGGGTTTATTACTGCATGCAGVNAMNACA | ATGCAGVNAMNACAGACTCCTC | 1830 | 2439 |
| 28_10_3_9 | GACTCCTCCTACTTTTGGCGGAGGGACCAAG | CTACT | | |
| VK2- | GCTGAGGATGTTGGGGTTTATTACTGCATGCAGVNACTCSR | ATGCAGVNACTCSRMACTCCTC | 1831 | 2440 |
| 28_11_3_9 | MACTCCTCCTACTTTTGGCGGAGGGACCAAG | CTACT | | |
| VK2- | GCTGAGGATGTTGGGGTTTATTACTGCATGCAGVNACTCCA | ATGCAGVNACTCCAGVBCCCTC | 1832 | 2441 |
| 28_12_3_9 | GVBCCCTCCTACTTTTGGCGGAGGGACCAAG | CTACT | | |
| VK2- | GCTGAGGATGTTGGGGTTTATTACTGCATGCAGGCAMNASR | ATGCAGGCAMNASRMACTCCTC | 1833 | 2442 |
| 28_13_3_9 | MACTCCTCCTACTTTTGGCGGAGGGACCAAG | CTACT | | |
| VK2- | GCTGAGGATGTTGGGGTTTATTACTGCATGCAGGCAMNACA | ATGCAGGCAMNACAGVBCCCTC | 1834 | 2443 |
| 28_14_3_9 | GVBCCCTCCTACTTTTGGCGGAGGGACCAAG | CTACT | | |
| VK2- | GCTGAGGATGTTGGGGTTTATTACTGCATGCAGGCACTCSR | ATGCAGGCACTCSRMVBCCCTC | 1835 | 2444 |
| 28_15_3_9 | MVBCCCTCCTACTTTTGGCGGAGGGACCAAG | CTACT | | |
| VK2-28_2_3_9 | GCTGAGGATGTTGGGGTTTATTACTGCDTSCAGVNACTCCA | DTSCAGVNACTCCAGACTCCTC | 1836 | 2445 |
| | GACTCCTCCTACTTTTGGCGGAGGGACCAAG | CTACT | | |
| VK2-28_3_3_9 | GCTGAGGATGTTGGGGTTTATTACTGCDTSCAGGCAMNACA | DTSCAGGCAMNACAGACTCCTC | 1837 | 2446 |
| | GACTCCTCCTACTTTTGGCGGAGGGACCAAG | CTACT | | |
| VK2-28_4_3_9 | GCTGAGGATGTTGGGGTTTATTACTGCDTSCAGGCACTCSR | DTSCAGGCACTCSRMACTCCTC | 1838 | 2447 |
| | MACTCCTCCTACTTTTGGCGGAGGGACCAAG | CTACT | | |
| VK2-28_5_3_9 | GCTGAGGATGTTGGGGTTTATTACTGCDTSCAGGCACTCCA | DTSCAGGCACTCCAGVBCCCTC | 1839 | 2448 |
| | GVBCCCTCCTACTTTTGGCGGAGGGACCAAG | CTACT | | |
| VK2-28_6_3_9 | GCTGAGGATGTTGGGGTTTATTACTGCATGSWMVNACTCCA | ATGSWMVNACTCCAGACTCCTC | 1840 | 2449 |
| | GACTCCTCCTACTTTTGGCGGAGGGACCAAG | CTACT | | |
| VK2-28_7_3_9 | GCTGAGGATGTTGGGGTTTATTACTGCATGSWMGCAMNACA | ATGSWMGCAMNACAGACTCCTC | 1841 | 2450 |
| | GACTCCTCCTACTTTTGGCGGAGGGACCAAG | CTACT | | |
| VK2-28_8_3_9 | GCTGAGGATGTTGGGGTTTATTACTGCATGSWMGCACTCSR | ATGSWMGCACTCSRMACTCCTC | 1842 | 2451 |
| | MACTCCTCCTACTTTTGGCGGAGGGACCAAG | CTACT | | |
| VK2-28_9_3_9 | GCTGAGGATGTTGGGGTTTATTACTGCATGSWMGCACTCCA | ATGSWMGCACTCCAGVBCCCTC | 1843 | 2452 |
| | GVBCCCTCCTACTTTTGGCGGAGGGACCAAG | CTACT | | |
| VK3-11_1_0_9 | CCTGAAGATTTTGCAGTTTATTACTGTSWMSWMAGAAGTAA | SWMSWMAGAAGTAATTGGCCTT | 1844 | 2453 |
| | TTGGCCTTWCACTTTTGGCGGAGGGACCAAG | WCACT | | |
| VK3- | CCTGAAGATTTTGCAGTTTATTACTGTCAGCAGBHCNHCAA | CAGCAGBHCNHCAATTGGCCTT | 1845 | 2454 |
| 11_10_0_9 | TTGGCCTTWCACTTTTGGCGGAGGGACCAAG | WCACT | | |
| VK3- | CCTGAAGATTTTGCAGTTTATTACTGTCAGCAGBHCAGTNH | CAGCAGBHCAGTNHCTGGCCTT | 1846 | 2455 |
| 11_11_0_9 | CTGGCCTTWCACTTTTGGCGGAGGGACCAAG | WCACT | | |
| VK3- | CCTGAAGATTTTGCAGTTTATTACTGTCAGCAGBHCAGTAA | CAGCAGBHCAGTAATYWCCCTT | 1847 | 2456 |
| 11_12_0_9 | TYWCCCTTWCACTTTTGGCGGAGGGACCAAG | WCACT | | |
| VK3- | CCTGAAGATTTTGCAGTTTATTACTGTCAGCAGAGANHCNH | CAGCAGAGANHCNHCTGGCCTT | 1848 | 2457 |
| 11_13_0_9 | CTGGCCTTWCACTTTTGGCGGAGGGACCAAG | WCACT | | |
| VK3- | CCTGAAGATTTTGCAGTTTATTACTGTCAGCAGAGANHCAA | CAGCAGAGANHCAATYWCCCTT | 1849 | 2458 |
| 11_14_0_9 | TYWCCCTTWCACTTTTGGCGGAGGGACCAAG | WCACT | | |
| VK3- | CCTGAAGATTTTGCAGTTTATTACTGTCAGCAGAGAAGTNH | CAGCAGAGAAGTNHCYWCCCTT | 1850 | 2459 |
| 11_15_0_9 | CYWCCCTTWCACTTTTGGCGGAGGGACCAAG | WCACT | | |
| VK3-11_2_0_9 | CCTGAAGATTTTGCAGTTTATTACTGTSWMCAGBHCAGTAA | SWMCAGBHCAGTAATTGGCCTT | 1851 | 2460 |
| | TTGGCCTTWCACTTTTGGCGGAGGGACCAAG | WCACT | | |
| VK3-11_3_0_9 | CCTGAAGATTTTGCAGTTTATTACTGTSWMCAGAGANHCAA | SWMCAGAGANHCAATTGGCCTT | 1852 | 2461 |
| | TTGGCCTTWCACTTTTGGCGGAGGGACCAAG | WCACT | | |
| VK3-11_4_0_9 | CCTGAAGATTTTGCAGTTTATTACTGTSWMCAGAGAAGTNH | SWMCAGAGAAGTNHCTGGCCTT | 1853 | 2462 |
| | CTGGCCTTWCACTTTTGGCGGAGGGACCAAG | WCACT | | |
| VK3-11_5_0_9 | CCTGAAGATTTTGCAGTTTATTACTGTSWMCAGAGAAGTAA | SWMCAGAGAAGTAATYWCCCTT | 1854 | 2463 |
| | TYWCCCTTWCACTTTTGGCGGAGGGACCAAG | WCACT | | |
| VK3-11_6_0_9 | CCTGAAGATTTTGCAGTTTATTACTGTCAGSWMBHCAGTAA | CAGSWMBHCAGTAATTGGCCTT | 1855 | 2464 |
| | TTGGCCTTWCACTTTTGGCGGAGGGACCAAG | WCACT | | |
| VK3-11_7_0_9 | CCTGAAGATTTTGCAGTTTATTACTGTCAGSWMAGANHCAA | CAGSWMAGANHCAATTGGCCTT | 1856 | 2465 |
| | TTGGCCTTWCACTTTTGGCGGAGGGACCAAG | WCACT | | |
| VK3-11_8_0_9 | CCTGAAGATTTTGCAGTTTATTACTGTCAGSWMAGAAGTNH | CAGSWMAGAAGTNHCTGGCCTT | 1857 | 2466 |
| | CTGGCCTTWCACTTTTGGCGGAGGGACCAAG | WCACT | | |
| VK3-11_9_0_9 | CCTGAAGATTTTGCAGTTTATTACTGTCAGSWMAGAAGTAA | CAGSWMAGAAGTAATYWCCCTT | 1858 | 2467 |
| | TYWCCCTTWCACTTTTGGCGGAGGGACCAAG | WCACT | | |
| VK3-11_1_1_9 | CCTGAAGATTTTGCAGTTTATTACTGTSWMSWMAGAAGTAA | SWMSWMAGAAGTAATTGGCCTM | 1859 | 2468 |
| | TTGGCCTMTCACTTTTGGCGGAGGGACCAAG | TCACT | | |
| VK3- | CCTGAAGATTTTGCAGTTTATTACTGTCAGCAGBHCNHCAA | CAGCAGBHCNHCAATTGGCCTM | 1860 | 2469 |
| 11_10_1_9 | TTGGCCTMTCACTTTTGGCGGAGGGACCAAG | TCACT | | |
| VK3- | CCTGAAGATTTTGCAGTTTATTACTGTCAGCAGBHCAGTNH | CAGCAGBHCAGTNHCTGGCCTM | 1861 | 2470 |
| 11_11_1_9 | CTGGCCTMTCACTTTTGGCGGAGGGACCAAG | TCACT | | |
| VK3- | CCTGAAGATTTTGCAGTTTATTACTGTCAGCAGBHCAGTAA | CAGCAGBHCAGTAATYWCCCTM | 1862 | 2471 |
| 11_12_1_9 | TYWCCCTMTCACTTTTGGCGGAGGGACCAAG | TCACT | | |
| VK3- | CCTGAAGATTTTGCAGTTTATTACTGTCAGCAGAGANHCNH | CAGCAGAGANHCNHCTGGCCTM | 1863 | 2472 |
| 11_13_1_9 | CTGGCCTMTCACTTTTGGCGGAGGGACCAAG | TCACT | | |
| VK3- | CCTGAAGATTTTGCAGTTTATTACTGTCAGCAGAGANHCAA | CAGCAGAGANHCAATYWCCCTM | 1864 | 2473 |
| 11_14_1_9 | TYWCCCTMTCACTTTTGGCGGAGGGACCAAG | TCACT | | |
| VK3- | CCTGAAGATTTTGCAGTTTATTACTGTCAGCAGAGAAGTNH | CAGCAGAGAAGTNHCYWCCCTM | 1865 | 2474 |
| 11_15_1_9 | CYWCCCTMTCACTTTTGGCGGAGGGACCAAG | TCACT | | |
| VK3-11_2_1_9 | CCTGAAGATTTTGCAGTTTATTACTGTSWMCAGBHCAGTAA | SWMCAGBHCAGTAATTGGCCTM | 1866 | 2475 |
| | TTGGCCTMTCACTTTTGGCGGAGGGACCAAG | TCACT | | |
| VK3-11_3_1_9 | CCTGAAGATTTTGCAGTTTATTACTGTSWMCAGAGANHCAA | SWMCAGAGANHCAATTGGCCTM | 1867 | 2476 |
| | TTGGCCTMTCACTTTTGGCGGAGGGACCAAG | TCACT | | |
| VK3-11_4_1_9 | CCTGAAGATTTTGCAGTTTATTACTGTSWMCAGAGAAGTNH | SWMCAGAGAAGTNHCTGGCCTM | 1868 | 2477 |
| | CTGGCCTMTCACTTTTGGCGGAGGGACCAAG | TCACT | | |
| VK3-11_5_1_9 | CCTGAAGATTTTGCAGTTTATTACTGTSWMCAGAGAAGTAA | SWMCAGAGAAGTAATYWCCCTM | 1869 | 2478 |
| | TYWCCCTMTCACTTTTGGCGGAGGGACCAAG | TCACT | | |
| VK3-11_6_1_9 | CCTGAAGATTTTGCAGTTTATTACTGTCAGSWMBHCAGTAA | CAGSWMBHCAGTAATTGGCCTM | 1870 | 2479 |
| | TTGGCCTMTCACTTTTGGCGGAGGGACCAAG | TCACT | | |
| VK3-11_7_1_9 | CCTGAAGATTTTGCAGTTTATTACTGTCAGSWMAGANHCAA | CAGSWMAGANHCAATTGGCCTM | 1871 | 2480 |
| | TTGGCCTMTCACTTTTGGCGGAGGGACCAAG | TCACT | | |
| VK3-11_8_1_9 | CCTGAAGATTTTGCAGTTTATTACTGTCAGSWMAGAAGTNH | CAGSWMAGAAGTNHCTGGCCTM | 1872 | 2481 |
| | CTGGCCTMTCACTTTTGGCGGAGGGACCAAG | TCACT | | |
| VK3-11_9_1_9 | CCTGAAGATTTTGCAGTTTATTACTGTCAGSWMAGAAGTAA | CAGSWMAGAAGTAATYWCCCTM | 1873 | 2482 |
| | TYWCCCTMTCACTTTTGGCGGAGGGACCAAG | TCACT | | |
| VK3-11_1_2_9 | CCTGAAGATTTTGCAGTTTATTACTGTSWMSWMAGAAGTAA | SWMSWMAGAAGTAATTGGCCTW | 1874 | 2483 |
| | TTGGCCTWGGACTTTTGGCGGAGGGACCAAG | GGACT | | |
| VK3- | CCTGAAGATTTTGCAGTTTATTACTGTCAGCAGBHCNHCAA | CAGCAGBHCNHCAATTGGCCTW | 1875 | 2484 |
| 11_10_2_9 | TTGGCCTWGGACTTTTGGCGGAGGGACCAAG | GGACT | | |
| VK3- | CCTGAAGATTTTGCAGTTTATTACTGTCAGCAGBHCAGTNH | CAGCAGBHCAGTNHCTGGCCTW | 1876 | 2485 |
| 11_11_2_9 | CTGGCCTWGGACTTTTGGCGGAGGGACCAAG | GGACT | | |
| VK3- | CCTGAAGATTTTGCAGTTTATTACTGTCAGCAGBHCAGTAA | CAGCAGBHCAGTAATYWCCCTW | 1877 | 2486 |
| 11_12_2_9 | TYWCCCTWGGACTTTTGGCGGAGGGACCAAG | GGACT | | |
| VK3- | CCTGAAGATTTTGCAGTTTATTACTGTCAGCAGAGANHCNH | CAGCAGAGANHCNHCTGGCCTW | 1878 | 2487 |
| 11_13_2_9 | CTGGCCTWGGACTTTTGGCGGAGGGACCAAG | GGACT | | |
| VK3- | CCTGAAGATTTTGCAGTTTATTACTGTCAGCAGAGANHCAA | CAGCAGAGANHCAATYWCCCTW | 1879 | 2488 |
| 11_14_2_9 | TYWCCCTWGGACTTTTGGCGGAGGGACCAAG | GGACT | | |
| VK3- | CCTGAAGATTTTGCAGTTTATTACTGTCAGCAGAGAAGTNH | CAGCAGAGAAGTNHCYWCCCTW | 1880 | 2489 |
| 11_15_2_9 | CYWCCCTWGGACTTTTGGCGGAGGGACCAAG | GGACT | | |
| VK3-11_2_2_9 | CCTGAAGATTTTGCAGTTTATTACTGTSWMCAGBHCAGTAA | SWMCAGBHCAGTAATTGGCCTW | 1881 | 2490 |
| | TTGGCCTWGGACTTTTGGCGGAGGGACCAAG | GGACT | | |
| VK3-11_3_2_9 | CCTGAAGATTTTGCAGTTTATTACTGTSWMCAGAGANHCAA | SWMCAGAGANHCAATTGGCCTW | 1882 | 2491 |
| | TTGGCCTWGGACTTTTGGCGGAGGGACCAAG | GGACT | | |
| VK3-11_4_2_9 | CCTGAAGATTTTGCAGTTTATTACTGTSWMCAGAGAAGTNH | SWMCAGAGAAGTNHCTGGCCTW | 1883 | 2492 |
| | CTGGCCTWGGACTTTTGGCGGAGGGACCAAG | GGACT | | |
| VK3-11_5_2_9 | CCTGAAGATTTTGCAGTTTATTACTGTSWMCAGAGAAGTAA | SWMCAGAGAAGTAATYWCCCTW | 1884 | 2493 |
| | TYWCCCTWGGACTTTTGGCGGAGGGACCAAG | GGACT | | |
| VK3-11_6_2_9 | CCTGAAGATTTTGCAGTTTATTACTGTCAGSWMBHCAGTAA | CAGSWMBHCAGTAATTGGCCTW | 1885 | 2494 |
| | TTGGCCTWGGACTTTTGGCGGAGGGACCAAG | GGACT | | |
| VK3-11_7_2_9 | CCTGAAGATTTTGCAGTTTATTACTGTCAGSWMAGANHCAA | CAGSWMAGANHCAATTGGCCTW | 1886 | 2495 |
| | TTGGCCTWGGACTTTTGGCGGAGGGACCAAG | GGACT | | |
| VK3-11_8_2_9 | CCTGAAGATTTTGCAGTTTATTACTGTCAGSWMAGAAGTNH | CAGSWMAGAAGTNHCTGGCCTW | 1887 | 2496 |
| | CTGGCCTWGGACTTTTGGCGGAGGGACCAAG | GGACT | | |
| VK3-11_9_2_9 | CCTGAAGATTTTGCAGTTTATTACTGTCAGSWMAGAAGTAA | CAGSWMAGAAGTAATYWCCCTW | 1888 | 2497 |
| | TYWCCCTWGGACTTTTGGCGGAGGGACCAAG | GGACT | | |
| VK3-11_1_3_9 | CCTGAAGATTTTGCAGTTTATTACTGTSWMSWMAGAAGTAA | SWMSWMAGAAGTAATTGGCCTC | 1889 | 2498 |
| | TTGGCCTCCTACTTTTGGCGGAGGGACCAAG | CTACT | | |
| VK3- | CCTGAAGATTTTGCAGTTTATTACTGTCAGCAGBHCNHCAA | CAGCAGBHCNHCAATTGGCCTC | 1890 | 2499 |
| 11_10_3_9 | TTGGCCTCCTACTTTTGGCGGAGGGACCAAG | CTACT | | |
| VK3- | CCTGAAGATTTTGCAGTTTATTACTGTCAGCAGBHCAGTNH | CAGCAGBHCAGTNHCTGGCCTC | 1891 | 2500 |
| 11_11_3_9 | CTGGCCTCCTACTTTTGGCGGAGGGACCAAG | CTACT | | |
| VK3- | CCTGAAGATTTTGCAGTTTATTACTGTCAGCAGBHCAGTAA | CAGCAGBHCAGTAATYWCCCTC | 1892 | 2501 |
| 11_12_3_9 | TYWCCCTCCTACTTTTGGCGGAGGGACCAAG | CTACT | | |
| VK3- | CCTGAAGATTTTGCAGTTTATTACTGTCAGCAGAGANHCNH | CAGCAGAGANHCNHCTGGCCTC | 1893 | 2502 |
| 11_13_3_9 | CTGGCCTCCTACTTTTGGCGGAGGGACCAAG | CTACT | | |
| VK3- | CCTGAAGATTTTGCAGTTTATTACTGTCAGCAGAGANHCAA | CAGCAGAGANHCAATYWCCCTC | 1894 | 2503 |
| 11_14_3_9 | TYWCCCTCCTACTTTTGGCGGAGGGACCAAG | CTACT | | |
| VK3- | CCTGAAGATTTTGCAGTTTATTACTGTCAGCAGAGAAGTNH | CAGCAGAGAAGTNHCYWCCCTC | 1895 | 2504 |
| 11_15_3_9 | CYWCCCTCCTACTTTTGGCGGAGGGACCAAG | CTACT | | |
| VK3-11_2_3_9 | CCTGAAGATTTTGCAGTTTATTACTGTSWMCAGBHCAGTAA | SWMCAGBHCAGTAATTGGCCTC | 1896 | 2505 |
| | TTGGCCTCCTACTTTTGGCGGAGGGACCAAG | CTACT | | |
| VK3-11_3_3_9 | CCTGAAGATTTTGCAGTTTATTACTGTSWMCAGAGANHCAA | SWMCAGAGANHCAATTGGCCTC | 1897 | 2506 |
| | TTGGCCTCCTACTTTTGGCGGAGGGACCAAG | CTACT | | |
| VK3-11_4_3_9 | CCTGAAGATTTTGCAGTTTATTACTGTSWMCAGAGAAGTNH | SWMCAGAGAAGTNHCTGGCCTC | 1898 | 2507 |
| | CTGGCCTCCTACTTTTGGCGGAGGGACCAAG | CTACT | | |
| VK3-11_5_3_9 | CCTGAAGATTTTGCAGTTTATTACTGTSWMCAGAGAAGTAA | SWMCAGAGAAGTAATYWCCCTC | 1899 | 2508 |
| | TYWCCCTCCTACTTTTGGCGGAGGGACCAAG | CTACT | | |
| VK3-11_6_3_9 | CCTGAAGATTTTGCAGTTTATTACTGTCAGSWMBHCAGTAA | CAGSWMBHCAGTAATTGGCCTC | 1900 | 2509 |
| | TTGGCCTCCTACTTTTGGCGGAGGGACCAAG | CTACT | | |
| VK3-11_7_3_9 | CCTGAAGATTTTGCAGTTTATTACTGTCAGSWMAGANHCAA | CAGSWMAGANHCAATTGGCCTC | 1901 | 2510 |
| | TTGGCCTCCTACTTTTGGCGGAGGGACCAAG | CTACT | | |
| VK3-11_8_3_9 | CCTGAAGATTTTGCAGTTTATTACTGTCAGSWMAGAAGTNH | CAGSWMAGAAGTNHCTGGCCTC | 1902 | 2511 |
| | CTGGCCTCCTACTTTTGGCGGAGGGACCAAG | CTACT | | |
| VK3-11_9_3_9 | CCTGAAGATTTTGCAGTTTATTACTGTCAGSWMAGAAGTAA | CAGSWMAGAAGTAATYWCCCTC | 1903 | 2512 |
| | TYWCCCTCCTACTTTTGGCGGAGGGACCAAG | CTACT | | |
| VK3-15_1_0_9 | CAGTCTGAAGATTTTGCAGTTTATTACTGTSWMSWMTACAA | SWMSWMTACAATAATTGGCCTT | 1904 | 2513 |
| | TAATTGGCCTTWCACTTTTGGCGGAGGGACCAAG | WCACT | | |
| VK3- | CAGTCTGAAGATTTTGCAGTTTATTACTGTCAGCAGBHCNH | CAGCAGBHCNHCAATTGGCCTT | 1905 | 2454 |
| 15_10_0_9 | CAATTGGCCTTWCACTTTTGGCGGAGGGACCAAG | WCACT | | |
| VK3- | CAGTCTGAAGATTTTGCAGTTTATTACTGTCAGCAGBHCAA | CAGCAGBHCAATNHCTGGCCTT | 1906 | 2514 |
| 15_11_0_9 | TNHCTGGCCTTWCACTTTTGGCGGAGGGACCAAG | WCACT | | |
| VK3- | CAGTCTGAAGATTTTGCAGTTTATTACTGTCAGCAGBHCAA | CAGCAGBHCAATAATYWCCCTT | 1907 | 2515 |
| 15_12_0_9 | TAATYWCCCTTWCACTTTTGGCGGAGGGACCAAG | WCACT | | |
| VK3- | CAGTCTGAAGATTTTGCAGTTTATTACTGTCAGCAGTACNH | CAGCAGTACNHCNHCTGGCCTT | 1908 | 2516 |
| 15_13_0_9 | CNHCTGGCCTTWCACTTTTGGCGGAGGGACCAAG | WCACT | | |
| VK3- | CAGTCTGAAGATTTTGCAGTTTATTACTGTCAGCAGTACNH | CAGCAGTACNHCAATYWCCCTT | 1909 | 2293 |
| 15_14_0_9 | CAATYWCCCTTWCACTTTTGGCGGAGGGACCAAG | WCACT | | |
| VK3- | CAGTCTGAAGATTTTGCAGTTTATTACTGTCAGCAGTACAA | CAGCAGTACAATNHCYWCCCTT | 1910 | 2517 |
| 15_15_0_9 | TNHCYWCCCTTWCACTTTTGGCGGAGGGACCAAG | WCACT | | |
| VK3-15_2_0_9 | CAGTCTGAAGATTTTGCAGTTTATTACTGTSWMCAGBHCAA | SWMCAGBHCAATAATTGGCCTT | 1911 | 2518 |
| | TAATTGGCCTTWCACTTTTGGCGGAGGGACCAAG | WCACT | | |
| VK3-15_3_0_9 | CAGTCTGAAGATTTTGCAGTTTATTACTGTSWMCAGTACNH | SWMCAGTACNHCAATTGGCCTT | 1912 | 2519 |
| | CAATTGGCCTTWCACTTTTGGCGGAGGGACCAAG | WCACT | | |
| VK3-15_4_0_9 | CAGTCTGAAGATTTTGCAGTTTATTACTGTSWMCAGTACAA | SWMCAGTACAATNHCTGGCCTT | 1913 | 2520 |
| | TNHCTGGCCTTWCACTTTTGGCGGAGGGACCAAG | WCACT | | |
| VK3-15_5_0_9 | CAGTCTGAAGATTTTGCAGTTTATTACTGTSWMCAGTACAA | SWMCAGTACAATAATYWCCCTT | 1914 | 2521 |
| | TAATYWCCCTTWCACTTTTGGCGGAGGGACCAAG | WCACT | | |
| VK3-15_6_0_9 | CAGTCTGAAGATTTTGCAGTTTATTACTGTCAGSWMBHCAA | CAGSWMBHCAATAATTGGCCTT | 1915 | 2522 |
| | TAATTGGCCTTWCACTTTTGGCGGAGGGACCAAG | WCACT | | |
| VK3-15_7_0_9 | CAGTCTGAAGATTTTGCAGTTTATTACTGTCAGSWMTACNH | CAGSWMTACNHCAATTGGCCTT | 1916 | 2523 |
| | CAATTGGCCTTWCACTTTTGGCGGAGGGACCAAG | WCACT | | |
| VK3-15_8_0_9 | CAGTCTGAAGATTTTGCAGTTTATTACTGTCAGSWMTACAA | CAGSWMTACAATNHCTGGCCTT | 1917 | 2524 |
| | TNHCTGGCCTTWCACTTTTGGCGGAGGGACCAAG | WCACT | | |
| VK3-15_9_0_9 | CAGTCTGAAGATTTTGCAGTTTATTACTGTCAGSWMTACAA | CAGSWMTACAATAATYWCCCTT | 1918 | 2525 |
| | TAATYWCCCTTWCACTTTTGGCGGAGGGACCAAG | WCACT | | |
| VK3-15_1_1_9 | CAGTCTGAAGATTTTGCAGTTTATTACTGTSWMSWMTACAA | SWMSWMTACAATAATTGGCCTM | 1919 | 2526 |
| | TAATTGGCCTMTCACTTTTGGCGGAGGGACCAAG | TCACT | | |
| VK3- | CAGTCTGAAGATTTTGCAGTTTATTACTGTCAGCAGBHCNH | CAGCAGBHCNHCAATTGGCCTM | 1920 | 2469 |
| 15_10_1_9 | CAATTGGCCTMTCACTTTTGGCGGAGGGACCAAG | TCACT | | |
| VK3- | CAGTCTGAAGATTTTGCAGTTTATTACTGTCAGCAGBHCAA | CAGCAGBHCAATNHCTGGCCTM | 1921 | 2527 |
| 15_11_1_9 | TNHCTGGCCTMTCACTTTTGGCGGAGGGACCAAG | TCACT | | |
| VK3- | CAGTCTGAAGATTTTGCAGTTTATTACTGTCAGCAGBHCAA | CAGCAGBHCAATAATYWCCCTM | 1922 | 2528 |
| 15_12_1_9 | TAATYWCCCTMTCACTTTTGGCGGAGGGACCAAG | TCACT | | |
| VK3- | CAGTCTGAAGATTTTGCAGTTTATTACTGTCAGCAGTACNH | CAGCAGTACNHCNHCTGGCCTM | 1923 | 2529 |
| 15_13_1_9 | CNHCTGGCCTMTCACTTTTGGCGGAGGGACCAAG | TCACT | | |
| VK3- | CAGTCTGAAGATTTTGCAGTTTATTACTGTCAGCAGTACNH | CAGCAGTACNHCAATYWCCCTM | 1924 | 2308 |
| 15_14_1_9 | CAATYWCCCTMTCACTTTTGGCGGAGGGACCAAG | TCACT | | |
| VK3- | CAGTCTGAAGATTTTGCAGTTTATTACTGTCAGCAGTACAA | CAGCAGTACAATNHCYWCCCTM | 1925 | 2530 |
| 15_15_1_9 | TNHCYWCCCTMTCACTTTTGGCGGAGGGACCAAG | TCACT | | |
| VK3-15_2_1_9 | CAGTCTGAAGATTTTGCAGTTTATTACTGTSWMCAGBHCAA | SWMCAGBHCAATAATTGGCCTM | 1926 | 2531 |
| | TAATTGGCCTMTCACTTTTGGCGGAGGGACCAAG | TCACT | | |
| VK3-15_3_1_9 | CAGTCTGAAGATTTTGCAGTTTATTACTGTSWMCAGTACNH | SWMCAGTACNHCAATTGGCCTM | 1927 | 2532 |
| | CAATTGGCCTMTCACTTTTGGCGGAGGGACCAAG | TCACT | | |
| VK3-15_4_1_9 | CAGTCTGAAGATTTTGCAGTTTATTACTGTSWMCAGTACAA | SWMCAGTACAATNHCTGGCCTM | 1928 | 2533 |
| | TNHCTGGCCTMTCACTTTTGGCGGAGGGACCAAG | TCACT | | |
| VK3-15_5_1_9 | CAGTCTGAAGATTTTGCAGTTTATTACTGTSWMCAGTACAA | SWMCAGTACAATAATYWCCCTM | 1929 | 2534 |
| | TAATYWCCCTMTCACTTTTGGCGGAGGGACCAAG | TCACT | | |
| VK3-15_6_1_9 | CAGTCTGAAGATTTTGCAGTTTATTACTGTCAGSWMBHCAA | CAGSWMBHCAATAATTGGCCTM | 1930 | 2535 |
| | TAATTGGCCTMTCACTTTTGGCGGAGGGACCAAG | TCACT | | |
| VK3-15_7_1_9 | CAGTCTGAAGATTTTGCAGTTTATTACTGTCAGSWMTACNH | CAGSWMTACNHCAATTGGCCTM | 1931 | 2536 |
| | CAATTGGCCTMTCACTTTTGGCGGAGGGACCAAG | TCACT | | |
| VK3-15_8_1_9 | CAGTCTGAAGATTTTGCAGTTTATTACTGTCAGSWMTACAA | CAGSWMTACAATNHCTGGCCTM | 1932 | 2537 |
| | TNHCTGGCCTMTCACTTTTGGCGGAGGGACCAAG | TCACT | | |
| VK3-15_9_1_9 | CAGTCTGAAGATTTTGCAGTTTATTACTGTCAGSWMTACAA | CAGSWMTACAATAATYWCCCTM | 1933 | 2538 |
| | TAATYWCCCTMTCACTTTTGGCGGAGGGACCAAG | TCACT | | |
| VK3-15_1_2_9 | CAGTCTGAAGATTTTGCAGTTTATTACTGTSWMSWMTACAA | SWMSWMTACAATAATTGGCCTW | 1934 | 2539 |
| | TAATTGGCCTWGGACTTTTGGCGGAGGGACCAAG | GGACT | | |
| VK3- | CAGTCTGAAGATTTTGCAGTTTATTACTGTCAGCAGBHCNH | CAGCAGBHCNHCAATTGGCCTW | 1935 | 2484 |
| 15_10_2_9 | CAATTGGCCTWGGACTTTTGGCGGAGGGACCAAG | GGACT | | |
| VK3- | CAGTCTGAAGATTTTGCAGTTTATTACTGTCAGCAGBHCAA | CAGCAGBHCAATNHCTGGCCTW | 1936 | 2540 |
| 15_11_2_9 | TNHCTGGCCTWGGACTTTTGGCGGAGGGACCAAG | GGACT | | |
| VK3- | CAGTCTGAAGATTTTGCAGTTTATTACTGTCAGCAGBHCAA | CAGCAGBHCAATAATYWCCCTW | 1937 | 2541 |
| 15_12_2_9 | TAATYWCCCTWGGACTTTTGGCGGAGGGACCAAG | GGACT | | |
| VK3- | CAGTCTGAAGATTTTGCAGTTTATTACTGTCAGCAGTACNH | CAGCAGTACNHCNHCTGGCCTW | 1938 | 2542 |
| 15_13_2_9 | CNHCTGGCCTWGGACTTTTGGCGGAGGGACCAAG | GGACT | | |
| VK3- | CAGTCTGAAGATTTTGCAGTTTATTACTGTCAGCAGTACNH | CAGCAGTACNHCAATYWCCCTW | 1939 | 2323 |
| 15_14_2_9 | CAATYWCCCTWGGACTTTTGGCGGAGGGACCAAG | GGACT | | |
| VK3- | CAGTCTGAAGATTTTGCAGTTTATTACTGTCAGCAGTACAA | CAGCAGTACAATNHCYWCCCTW | 1940 | 2543 |
| 15_15_2_9 | TNHCYWCCCTWGGACTTTTGGCGGAGGGACCAAG | GGACT | | |
| VK3-15_2_2_9 | CAGTCTGAAGATTTTGCAGTTTATTACTGTSWMCAGBHCAA | SWMCAGBHCAATAATTGGCCTW | 1941 | 2544 |
| | TAATTGGCCTWGGACTTTTGGCGGAGGGACCAAG | GGACT | | |
| VK3-15_3_2_9 | CAGTCTGAAGATTTTGCAGTTTATTACTGTSWMCAGTACNH | SWMCAGTACNHCAATTGGCCTW | 1942 | 2545 |
| | CAATTGGCCTWGGACTTTTGGCGGAGGGACCAAG | GGACT | | |
| VK3-15_4_2_9 | CAGTCTGAAGATTTTGCAGTTTATTACTGTSWMCAGTACAA | SWMCAGTACAATNHCTGGCCTW | 1943 | 2546 |
| | TNHCTGGCCTWGGACTTTTGGCGGAGGGACCAAG | GGACT | | |
| VK3-15_5_2_9 | CAGTCTGAAGATTTTGCAGTTTATTACTGTSWMCAGTACAA | SWMCAGTACAATAATYWCCCTW | 1944 | 2547 |
| | TAATYWCCCTWGGACTTTTGGCGGAGGGACCAAG | GGACT | | |
| VK3-15_6_2_9 | CAGTCTGAAGATTTTGCAGTTTATTACTGTCAGSWMBHCAA | CAGSWMBHCAATAATTGGCCTW | 1945 | 2548 |
| | TAATTGGCCTWGGACTTTTGGCGGAGGGACCAAG | GGACT | | |
| VK3-15_7_2_9 | CAGTCTGAAGATTTTGCAGTTTATTACTGTCAGSWMTACNH | CAGSWMTACNHCAATTGGCCTW | 1946 | 2549 |
| | CAATTGGCCTWGGACTTTTGGCGGAGGGACCAAG | GGACT | | |
| VK3-15_8_2_9 | CAGTCTGAAGATTTTGCAGTTTATTACTGTCAGSWMTACAA | CAGSWMTACAATNHCTGGCCTW | 1947 | 2550 |
| | TNHCTGGCCTWGGACTTTTGGCGGAGGGACCAAG | GGACT | | |
| VK3-15_9_2_9 | CAGTCTGAAGATTTTGCAGTTTATTACTGTCAGSWMTACAA | CAGSWMTACAATAATYWCCCTW | 1948 | 2551 |
| | TAATYWCCCTWGGACTTTTGGCGGAGGGACCAAG | GGACT | | |
| VK3-15_1_3_9 | CAGTCTGAAGATTTTGCAGTTTATTACTGTSWMSWMTACAA | SWMSWMTACAATAATTGGCCTC | 1949 | 2552 |
| | TAATTGGCCTCCTACTTTTGGCGGAGGGACCAAG | CTACT | | |
| VK3- | CAGTCTGAAGATTTTGCAGTTTATTACTGTCAGCAGBHCNH | CAGCAGBHCNHCAATTGGCCTC | 1950 | 2499 |
| 15_10_3_9 | CAATTGGCCTCCTACTTTTGGCGGAGGGACCAAG | CTACT | | |
| VK3- | CAGTCTGAAGATTTTGCAGTTTATTACTGTCAGCAGBHCAA | CAGCAGBHCAATNHCTGGCCTC | 1951 | 2553 |
| 15_11_3_9 | TNHCTGGCCTCCTACTTTTGGCGGAGGGACCAAG | CTACT | | |
| VK3- | CAGTCTGAAGATTTTGCAGTTTATTACTGTCAGCAGBHCAA | CAGCAGBHCAATAATYWCCCTC | 1952 | 2554 |
| 15_12_3_9 | TAATYWCCCTCCTACTTTTGGCGGAGGGACCAAG | CTACT | | |
| VK3- | CAGTCTGAAGATTTTGCAGTTTATTACTGTCAGCAGTACNH | CAGCAGTACNHCNHCTGGCCTC | 1953 | 2555 |
| 15_13_3_9 | CNHCTGGCCTCCTACTTTTGGCGGAGGGACCAAG | CTACT | | |
| VK3- | CAGTCTGAAGATTTTGCAGTTTATTACTGTCAGCAGTACNH | CAGCAGTACNHCAATYWCCCTC | 1954 | 2338 |
| 15_14_3_9 | CAATYWCCCTCCTACTTTTGGCGGAGGGACCAAG | CTACT | | |
| VK3- | CAGTCTGAAGATTTTGCAGTTTATTACTGTCAGCAGTACAA | CAGCAGTACAATNHCYWCCCTC | 1955 | 2556 |
| 15_15_3_9 | TNHCYWCCCTCCTACTTTTGGCGGAGGGACCAAG | CTACT | | |
| VK3-15_2_3_9 | CAGTCTGAAGATTTTGCAGTTTATTACTGTSWMCAGBHCAA | SWMCAGBHCAATAATTGGCCTC | 1956 | 2557 |
| | TAATTGGCCTCCTACTTTTGGCGGAGGGACCAAG | CTACT | | |
| VK3-15_3_3_9 | CAGTCTGAAGATTTTGCAGTTTATTACTGTSWMCAGTACNH | SWMCAGTACNHCAATTGGCCTC | 1957 | 2558 |
| | CAATTGGCCTCCTACTTTTGGCGGAGGGACCAAG | CTACT | | |
| VK3-15_4_3_9 | CAGTCTGAAGATTTTGCAGTTTATTACTGTSWMCAGTACAA | SWMCAGTACAATNHCTGGCCTC | 1958 | 2559 |
| | TNHCTGGCCTCCTACTTTTGGCGGAGGGACCAAG | CTACT | | |
| VK3-15_5_3_9 | CAGTCTGAAGATTTTGCAGTTTATTACTGTSWMCAGTACAA | SWMCAGTACAATAATYWCCCTC | 1959 | 2560 |
| | TAATYWCCCTCCTACTTTTGGCGGAGGGACCAAG | CTACT | | |
| VK3-15_6_3_9 | CAGTCTGAAGATTTTGCAGTTTATTACTGTCAGSWMBHCAA | CAGSWMBHCAATAATTGGCCTC | 1960 | 2561 |
| | TAATTGGCCTCCTACTTTTGGCGGAGGGACCAAG | CTACT | | |
| VK3-15_7_3_9 | CAGTCTGAAGATTTTGCAGTTTATTACTGTCAGSWMTACNH | CAGSWMTACNHCAATTGGCCTC | 1961 | 2562 |
| | CAATTGGCCTCCTACTTTTGGCGGAGGGACCAAG | CTACT | | |
| VK3-15_8_3_9 | CAGTCTGAAGATTTTGCAGTTTATTACTGTCAGSWMTACAA | CAGSWMTACAATNHCTGGCCTC | 1962 | 2563 |
| | TNHCTGGCCTCCTACTTTTGGCGGAGGGACCAAG | CTACT | | |
| VK3-15_9_3_9 | CAGTCTGAAGATTTTGCAGTTTATTACTGTCAGSWMTACAA | CAGSWMTACAATAATYWCCCTC | 1963 | 2564 |
| | TAATYWCCCTCCTACTTTTGGCGGAGGGACCAAG | CTACT | | |
| VK3-20_1_0_9 | CCTGAAGATTTTGCAGTGTATTACTGTSWMSWMTACGGAAG | SWMSWMTACGGAAGTAGTCCTT | 1964 | 2565 |
| | TAGTCCTTWCACTTTTGGCGGAGGGACCAAG | WCACT | | |
| VK3- | CCTGAAGATTTTGCAGTGTATTACTGTCAGCAGBHCBHCAG | CAGCAGBHCBHCAGTAGTCCTT | 1965 | 2566 |
| 20_10_0_9 | TAGTCCTTWCACTTTTGGCGGAGGGACCAAG | WCACT | | |
| VK3- | CCTGAAGATTTTGCAGTGTATTACTGTCAGCAGBHCGGAVN | CAGCAGBHCGGAVNCAGTCCTT | 1966 | 2567 |
| 20_11_0_9 | CAGTCCTTWCACTTTTGGCGGAGGGACCAAG | WCACT | | |
| VK3- | CCTGAAGATTTTGCAGTGTATTACTGTCAGCAGBHCGGAAG | CAGCAGBHCGGAAGTBHCCCTT | 1967 | 2568 |
| 20_12_0_9 | TBHCCCTTWCACTTTTGGCGGAGGGACCAAG | WCACT | | |
| VK3- | CCTGAAGATTTTGCAGTGTATTACTGTCAGCAGTACBHCVN | CAGCAGTACBHCVNCAGTCCTT | 1968 | 2569 |
| 20_13_0_9 | CAGTCCTTWCACTTTTGGCGGAGGGACCAAG | WCACT | | |
| VK3- | CCTGAAGATTTTGCAGTGTATTACTGTCAGCAGTACBHCAG | CAGCAGTACBHCAGTBHCCCTT | 1969 | 2570 |
| 20_14_0_9 | TBHCCCTTWCACTTTTGGCGGAGGGACCAAG | WCACT | | |
| VK3- | CCTGAAGATTTTGCAGTGTATTACTGTCAGCAGTACGGAVN | CAGCAGTACGGAVNCBHCCCTT | 1970 | 2571 |
| 20_15_0_9 | CBHCCCTTWCACTTTTGGCGGAGGGACCAAG | WCACT | | |
| VK3-20_2_0_9 | CCTGAAGATTTTGCAGTGTATTACTGTSWMCAGBHCGGAAG | SWMCAGBHCGGAAGTAGTCCTT | 1971 | 2572 |
| | TAGTCCTTWCACTTTTGGCGGAGGGACCAAG | WCACT | | |
| VK3-20_3_0_9 | CCTGAAGATTTTGCAGTGTATTACTGTSWMCAGTACBHCAG | SWMCAGTACBHCAGTAGTCCTT | 1972 | 2573 |
| | TAGTCCTTWCACTTTTGGCGGAGGGACCAAG | WCACT | | |
| VK3-20_4_0_9 | CCTGAAGATTTTGCAGTGTATTACTGTSWMCAGTACGGAVN | SWMCAGTACGGAVNCAGTCCTT | 1973 | 2574 |
| | CAGTCCTTWCACTTTTGGCGGAGGGACCAAG | WCACT | | |
| VK3-20_5_0_9 | CCTGAAGATTTTGCAGTGTATTACTGTSWMCAGTACGGAAG | SWMCAGTACGGAAGTBHCCCTT | 1974 | 2575 |
| | TBHCCCTTWCACTTTTGGCGGAGGGACCAAG | WCACT | | |
| VK3-20_6_0_9 | CCTGAAGATTTTGCAGTGTATTACTGTCAGSWMBHCGGAAG | CAGSWMBHCGGAAGTAGTCCTT | 1975 | 2576 |
| | TAGTCCTTWCACTTTTGGCGGAGGGACCAAG | WCACT | | |
| VK3-20_7_0_9 | CCTGAAGATTTTGCAGTGTATTACTGTCAGSWMTACBHCAG | CAGSWMTACBHCAGTAGTCCTT | 1976 | 2577 |
| | TAGTCCTTWCACTTTTGGCGGAGGGACCAAG | WCACT | | |
| VK3-20_8_0_9 | CCTGAAGATTTTGCAGTGTATTACTGTCAGSWMTACGGAVN | CAGSWMTACGGAVNCAGTCCTT | 1977 | 2578 |
| | CAGTCCTTWCACTTTTGGCGGAGGGACCAAG | WCACT | | |
| VK3-20_9_0_9 | CCTGAAGATTTTGCAGTGTATTACTGTCAGSWMTACGGAAG | CAGSWMTACGGAAGTBHCCCTT | 1978 | 2579 |
| | TBHCCCTTWCACTTTTGGCGGAGGGACCAAG | WCACT | | |
| VK3-20_1_1_9 | CCTGAAGATTTTGCAGTGTATTACTGTSWMSWMTACGGAAG | SWMSWMTACGGAAGTAGTCCTM | 1979 | 2580 |
| | TAGTCCTMTCACTTTTGGCGGAGGGACCAAG | TCACT | | |
| VK3- | CCTGAAGATTTTGCAGTGTATTACTGTCAGCAGBHCBHCAG | CAGCAGBHCBHCAGTAGTCCTM | 1980 | 2581 |
| 20_10_1_9 | TAGTCCTMTCACTTTTGGCGGAGGGACCAAG | TCACT | | |
| VK3- | CCTGAAGATTTTGCAGTGTATTACTGTCAGCAGBHCGGAVN | CAGCAGBHCGGAVNCAGTCCTM | 1981 | 2582 |
| 20_11_1_9 | CAGTCCTMTCACTTTTGGCGGAGGGACCAAG | TCACT | | |
| VK3- | CCTGAAGATTTTGCAGTGTATTACTGTCAGCAGBHCGGAAG | CAGCAGBHCGGAAGTBHCCCTM | 1982 | 2583 |
| 20_12_1_9 | TBHCCCTMTCACTTTTGGCGGAGGGACCAAG | TCACT | | |
| VK3- | CCTGAAGATTTTGCAGTGTATTACTGTCAGCAGTACBHCVN | CAGCAGTACBHCVNCAGTCCTM | 1983 | 2584 |
| 20_13_1_9 | CAGTCCTMTCACTTTTGGCGGAGGGACCAAG | TCACT | | |
| VK3- | CCTGAAGATTTTGCAGTGTATTACTGTCAGCAGTACBHCAG | CAGCAGTACBHCAGTBHCCCTM | 1984 | 2585 |
| 20_14_1_9 | TBHCCCTMTCACTTTTGGCGGAGGGACCAAG | TCACT | | |
| VK3- | CCTGAAGATTTTGCAGTGTATTACTGTCAGCAGTACGGAVN | CAGCAGTACGGAVNCBHCCCTM | 1985 | 2586 |
| 20_15_1_9 | CBHCCCTMTCACTTTTGGCGGAGGGACCAAG | TCACT | | |
| VK3-20_2_1_9 | CCTGAAGATTTTGCAGTGTATTACTGTSWMCAGBHCGGAAG | SWMCAGBHCGGAAGTAGTCCTM | 1986 | 2587 |
| | TAGTCCTMTCACTTTTGGCGGAGGGACCAAG | TCACT | | |
| VK3-20_3_1_9 | CCTGAAGATTTTGCAGTGTATTACTGTSWMCAGTACBHCAG | SWMCAGTACBHCAGTAGTCCTM | 1987 | 2588 |
| | TAGTCCTMTCACTTTTGGCGGAGGGACCAAG | TCACT | | |
| VK3-20_4_1_9 | CCTGAAGATTTTGCAGTGTATTACTGTSWMCAGTACGGAVN | SWMCAGTACGGAVNCAGTCCTM | 1988 | 2589 |
| | CAGTCCTMTCACTTTTGGCGGAGGGACCAAG | TCACT | | |
| VK3-20_5_1_9 | CCTGAAGATTTTGCAGTGTATTACTGTSWMCAGTACGGAAG | SWMCAGTACGGAAGTBHCCCTM | 1989 | 2590 |
| | TBHCCCTMTCACTTTTGGCGGAGGGACCAAG | TCACT | | |
| VK3-20_6_1_9 | CCTGAAGATTTTGCAGTGTATTACTGTCAGSWMBHCGGAAG | CAGSWMBHCGGAAGTAGTCCTM | 1990 | 2591 |
| | TAGTCCTMTCACTTTTGGCGGAGGGACCAAG | TCACT | | |
| VK3-20_7_1_9 | CCTGAAGATTTTGCAGTGTATTACTGTCAGSWMTACBHCAG | CAGSWMTACBHCAGTAGTCCTM | 1991 | 2592 |
| | TAGTCCTMTCACTTTTGGCGGAGGGACCAAG | TCACT | | |
| VK3-20_8_1_9 | CCTGAAGATTTTGCAGTGTATTACTGTCAGSWMTACGGAVN | CAGSWMTACGGAVNCAGTCCTM | 1992 | 2593 |
| | CAGTCCTMTCACTTTTGGCGGAGGGACCAAG | TCACT | | |
| VK3-20_9_1_9 | CCTGAAGATTTTGCAGTGTATTACTGTCAGSWMTACGGAAG | CAGSWMTACGGAAGTBHCCCTM | 1993 | 2594 |
| | TBHCCCTMTCACTTTTGGCGGAGGGACCAAG | TCACT | | |
| VK3-20_1_2_9 | CCTGAAGATTTTGCAGTGTATTACTGTSWMSWMTACGGAAG | SWMSWMTACGGAAGTAGTCCTW | 1994 | 2595 |
| | TAGTCCTWGGACTTTTGGCGGAGGGACCAAG | GGACT | | |
| VK3- | CCTGAAGATTTTGCAGTGTATTACTGTCAGCAGBHCBHCAG | CAGCAGBHCBHCAGTAGTCCTW | 1995 | 2596 |
| 20_10_2_9 | TAGTCCTWGGACTTTTGGCGGAGGGACCAAG | GGACT | | |
| VK3- | CCTGAAGATTTTGCAGTGTATTACTGTCAGCAGBHCGGAVN | CAGCAGBHCGGAVNCAGTCCTW | 1996 | 2597 |
| 20_11_2_9 | CAGTCCTWGGACTTTTGGCGGAGGGACCAAG | GGACT | | |
| VK3- | CCTGAAGATTTTGCAGTGTATTACTGTCAGCAGBHCGGAAG | CAGCAGBHCGGAAGTBHCCCTW | 1997 | 2598 |
| 20_12_2_9 | TBHCCCTWGGACTTTTGGCGGAGGGACCAAG | GGACT | | |
| VK3- | CCTGAAGATTTTGCAGTGTATTACTGTCAGCAGTACBHCVN | CAGCAGTACBHCVNCAGTCCTW | 1998 | 2599 |
| 20_13_2_9 | CAGTCCTWGGACTTTTGGCGGAGGGACCAAG | GGACT | | |
| VK3- | CCTGAAGATTTTGCAGTGTATTACTGTCAGCAGTACBHCAG | CAGCAGTACBHCAGTBHCCCTW | 1999 | 2600 |
| 20_14_2_9 | TBHCCCTWGGACTTTTGGCGGAGGGACCAAG | GGACT | | |
| VK3- | CCTGAAGATTTTGCAGTGTATTACTGTCAGCAGTACGGAVN | CAGCAGTACGGAVNCBHCCCTW | 2000 | 2601 |
| 20_15_2_9 | CBHCCCTWGGACTTTTGGCGGAGGGACCAAG | GGACT | | |
| VK3-20_2_2_9 | CCTGAAGATTTTGCAGTGTATTACTGTSWMCAGBHCGGAAG | SWMCAGBHCGGAAGTAGTCCTW | 2001 | 2602 |
| | TAGTCCTWGGACTTTTGGCGGAGGGACCAAG | GGACT | | |
| VK3-20_3_2_9 | CCTGAAGATTTTGCAGTGTATTACTGTSWMCAGTACBHCAG | SWMCAGTACBHCAGTAGTCCTW | 2002 | 2603 |
| | TAGTCCTWGGACTTTTGGCGGAGGGACCAAG | GGACT | | |
| VK3-20_4_2_9 | CCTGAAGATTTTGCAGTGTATTACTGTSWMCAGTACGGAVN | SWMCAGTACGGAVNCAGTCCTW | 2003 | 2604 |
| | CAGTCCTWGGACTTTTGGCGGAGGGACCAAG | GGACT | | |
| VK3-20_5_2_9 | CCTGAAGATTTTGCAGTGTATTACTGTSWMCAGTACGGAAG | SWMCAGTACGGAAGTBHCCCTW | 2004 | 2605 |
| | TBHCCCTWGGACTTTTGGCGGAGGGACCAAG | GGACT | | |
| VK3-20_6_2_9 | CCTGAAGATTTTGCAGTGTATTACTGTCAGSWMBHCGGAAG | CAGSWMBHCGGAAGTAGTCCTW | 2005 | 2606 |
| | TAGTCCTWGGACTTTTGGCGGAGGGACCAAG | GGACT | | |
| VK3-20_7_2_9 | CCTGAAGATTTTGCAGTGTATTACTGTCAGSWMTACBHCAG | CAGSWMTACBHCAGTAGTCCTW | 2006 | 2607 |
| | TAGTCCTWGGACTTTTGGCGGAGGGACCAAG | GGACT | | |
| VK3-20_8_2_9 | CCTGAAGATTTTGCAGTGTATTACTGTCAGSWMTACGGAVN | CAGSWMTACGGAVNCAGTCCTW | 2007 | 2608 |
| | CAGTCCTWGGACTTTTGGCGGAGGGACCAAG | GGACT | | |
| VK3-20_9_2_9 | CCTGAAGATTTTGCAGTGTATTACTGTCAGSWMTACGGAAG | CAGSWMTACGGAAGTBHCCCTW | 2008 | 2609 |
| | TBHCCCTWGGACTTTTGGCGGAGGGACCAAG | GGACT | | |
| VK3-20_1_3_9 | CCTGAAGATTTTGCAGTGTATTACTGTSWMSWMTACGGAAG | SWMSWMTACGGAAGTAGTCCTC | 2009 | 2610 |
| | TAGTCCTCCTACTTTTGGCGGAGGGACCAAG | CTACT | | |
| VK3- | CCTGAAGATTTTGCAGTGTATTACTGTCAGCAGBHCBHCAG | CAGCAGBHCBHCAGTAGTCCTC | 2010 | 2611 |
| 20_10_3_9 | TAGTCCTCCTACTTTTGGCGGAGGGACCAAG | CTACT | | |
| VK3- | CCTGAAGATTTTGCAGTGTATTACTGTCAGCAGBHCGGAVN | CAGCAGBHCGGAVNCAGTCCTC | 2011 | 2612 |
| 20_11_3_9 | CAGTCCTCCTACTTTTGGCGGAGGGACCAAG | CTACT | | |
| VK3- | CCTGAAGATTTTGCAGTGTATTACTGTCAGCAGBHCGGAAG | CAGCAGBHCGGAAGTBHCCCTC | 2012 | 2613 |
| 20_12_3_9 | TBHCCCTCCTACTTTTGGCGGAGGGACCAAG | CTACT | | |
| VK3- | CCTGAAGATTTTGCAGTGTATTACTGTCAGCAGTACBHCVN | CAGCAGTACBHCVNCAGTCCTC | 2013 | 2614 |
| 20_13_3_9 | CAGTCCTCCTACTTTTGGCGGAGGGACCAAG | CTACT | | |
| VK3- | CCTGAAGATTTTGCAGTGTATTACTGTCAGCAGTACBHCAG | CAGCAGTACBHCAGTBHCCCTC | 2014 | 2615 |
| 20_14_3_9 | TBHCCCTCCTACTTTTGGCGGAGGGACCAAG | CTACT | | |
| VK3- | CCTGAAGATTTTGCAGTGTATTACTGTCAGCAGTACGGAVN | CAGCAGTACGGAVNCBHCCCTC | 2015 | 2616 |
| 20_15_3_9 | CBHCCCTCCTACTTTTGGCGGAGGGACCAAG | CTACT | | |
| VK3-20_2_3_9 | CCTGAAGATTTTGCAGTGTATTACTGTSWMCAGBHCGGAAG | SWMCAGBHCGGAAGTAGTCCTC | 2016 | 2617 |
| | TAGTCCTCCTACTTTTGGCGGAGGGACCAAG | CTACT | | |
| VK3-20_3_3_9 | CCTGAAGATTTTGCAGTGTATTACTGTSWMCAGTACBHCAG | SWMCAGTACBHCAGTAGTCCTC | 2017 | 2618 |
| | TAGTCCTCCTACTTTTGGCGGAGGGACCAAG | CTACT | | |
| VK3-20_4_3_9 | CCTGAAGATTTTGCAGTGTATTACTGTSWMCAGTACGGAVN | SWMCAGTACGGAVNCAGTCCTC | 2018 | 2619 |
| | CAGTCCTCCTACTTTTGGCGGAGGGACCAAG | CTACT | | |
| VK3-20_5_3_9 | CCTGAAGATTTTGCAGTGTATTACTGTSWMCAGTACGGAAG | SWMCAGTACGGAAGTBHCCCTC | 2019 | 2620 |
| | TBHCCCTCCTACTTTTGGCGGAGGGACCAAG | CTACT | | |
| VK3-20_6_3_9 | CCTGAAGATTTTGCAGTGTATTACTGTCAGSWMBHCGGAAG | CAGSWMBHCGGAAGTAGTCCTC | 2020 | 2621 |
| | TAGTCCTCCTACTTTTGGCGGAGGGACCAAG | CTACT | | |
| VK3-20_7_3_9 | CCTGAAGATTTTGCAGTGTATTACTGTCAGSWMTACBHCAG | CAGSWMTACBHCAGTAGTCCTC | 2021 | 2622 |
| | TAGTCCTCCTACTTTTGGCGGAGGGACCAAG | CTACT | | |
| VK3-20_8_3_9 | CCTGAAGATTTTGCAGTGTATTACTGTCAGSWMTACGGAVN | CAGSWMTACGGAVNCAGTCCTC | 2022 | 2623 |
| | CAGTCCTCCTACTTTTGGCGGAGGGACCAAG | CTACT | | |
| VK3-20_9_3_9 | CCTGAAGATTTTGCAGTGTATTACTGTCAGSWMTACGGAAG | CAGSWMTACGGAAGTBHCCCTC | 2023 | 2624 |
| | TBHCCCTCCTACTTTTGGCGGAGGGACCAAG | CTACT | | |

Jumping Trimer

| | | | | |
|---|---|---|---|---|
| VK1-05_t1_0_9 | CCTGATGATTTTGCAACTTATTACTGCCAGCAGBHCVRMMBCTAC | CAGCAGBHCVRMMBCTACYCTTWC | 2024 | 2625 |
| | YCTTWCACTTTTGGCGGAGGGACCAAG | ACT | | |
| VK1-05_t1_1_9 | CCTGATGATTTTGCAACTTATTACTGCCAGCAGBHCVRMMBCTAC | CAGCAGBHCVRMMBCTACYCTMTC | 2025 | 2626 |
| | YCTMTCACTTTTGGCGGAGGGACCAAG | ACT | | |
| VK1-05_t1_2_9 | CCTGATGATTTTGCAACTTATTACTGCCAGCAGBHCVRMMBCTAC | CAGCAGBHCVRMMBCTACYCTWGG | 2026 | 2627 |
| | YCTWGGACTTTTGGCGGAGGGACCAAG | ACT | | |
| VK1-05_t1_3_9 | CCTGATGATTTTGCAACTTATTACTGCCAGCAGBHCVRMMBCTAC | CAGCAGBHCVRMMBCTACYCTCCT | 2027 | 2628 |
| | YCTCCTACTTTTGGCGGAGGGACCAAG | ACT | | |
| VK1-05_t2_0_9 | CCTGATGATTTTGCAACTTATTACTGCCAGCAGBHCAATMBCYWC | CAGCAGBHCAATMBCYWCYCTTWC | 2028 | 2629 |
| | YCTTWCACTTTTGGCGGAGGGACCAAG | ACT | | |
| VK1-05_t2_1_9 | CCTGATGATTTTGCAACTTATTACTGCCAGCAGBHCAATMBCYWC | CAGCAGBHCAATMBCYWCYCTMTC | 2029 | 2630 |
| | YCTMTCACTTTTGGCGGAGGGACCAAG | ACT | | |
| VK1-05_t2_2_9 | CCTGATGATTTTGCAACTTATTACTGCCAGCAGBHCAATMBCYWC | CAGCAGBHCAATMBCYWCYCTWGG | 2030 | 2631 |
| | YCTWGGACTTTTGGCGGAGGGACCAAG | ACT | | |
| VK1-05_t2_3_9 | CCTGATGATTTTGCAACTTATTACTGCCAGCAGBHCAATMBCYWC | CAGCAGBHCAATMBCYWCYCTCCT | 2031 | 2632 |
| | YCTCCTACTTTTGGCGGAGGGACCAAG | ACT | | |
| VK1-05_t3_0_9 | CCTGATGATTTTGCAACTTATTACTGCCAGCAGBHCVRMAGTYWC | CAGCAGBHCVRMAGTYWCYCTTWC | 2032 | 2633 |
| | YCTTWCACTTTTGGCGGAGGGACCAAG | ACT | | |
| VK1-05_t3_1_9 | CCTGATGATTTTGCAACTTATTACTGCCAGCAGBHCVRMAGTYWC | CAGCAGBHCVRMAGTYWCYCTMTC | 2033 | 2634 |
| | YCTMTCACTTTTGGCGGAGGGACCAAG | ACT | | |
| VK1-05_t3_2_9 | CCTGATGATTTTGCAACTTATTACTGCCAGCAGBHCVRMAGTYWC | CAGCAGBHCVRMAGTYWCYCTWGG | 2034 | 2635 |
| | YCTWGGACTTTTGGCGGAGGGACCAAG | ACT | | |
| VK1-05_t3_3_9 | CCTGATGATTTTGCAACTTATTACTGCCAGCAGBHCVRMAGTYWC | CAGCAGBHCVRMAGTYWCYCTCCT | 2035 | 2636 |
| | YCTCCTACTTTTGGCGGAGGGACCAAG | ACT | | |
| VK1-05_t4_0_9 | CCTGATGATTTTGCAACTTATTACTGCCAGCAGTACVRMMBCYWC | CAGCAGTACVRMMBCYWCYCTTWC | 2036 | 2637 |
| | YCTTWCACTTTTGGCGGAGGGACCAAG | ACT | | |
| VK1-05_t4_1_9 | CCTGATGATTTTGCAACTTATTACTGCCAGCAGTACVRMMBCYWC | CAGCAGTACVRMMBCYWCYCTMTC | 2037 | 2638 |
| | YCTMTCACTTTTGGCGGAGGGACCAAG | ACT | | |
| VK1-05_t4_2_9 | CCTGATGATTTTGCAACTTATTACTGCCAGCAGTACVRMMBCYWC | CAGCAGTACVRMMBCYWCYCTWGG | 2038 | 2639 |
| | YCTWGGACTTTTGGCGGAGGGACCAAG | ACT | | |
| VK1-05_t4_3_9 | CCTGATGATTTTGCAACTTATTACTGCCAGCAGTACVRMMBCYWC | CAGCAGTACVRMMBCYWCYCTCCT | 2039 | 2640 |
| | YCTCCTACTTTTGGCGGAGGGACCAAG | ACT | | |
| VK1-12_t1_0_9 | CCTGAAGATTTTGCAACTTATTACTGTCAGCAGRNANHCNHCTTC | CAGCAGRNANHCNHCTTCCCTTWC | 2040 | 2641 |
| | CCTTWCACTTTTGGCGGAGGGACCAAG | ACT | | |
| VK1-12_t1_1_9 | CCTGAAGATTTTGCAACTTATTACTGTCAGCAGRNANHCNHCTTC | CAGCAGRNANHCNHCTTCCCTMTC | 2041 | 2642 |
| | CCTMTCACTTTTGGCGGAGGGACCAAG | ACT | | |
| VK1-12_t1_2_9 | CCTGAAGATTTTGCAACTTATTACTGTCAGCAGRNANHCNHCTTC | CAGCAGRNANHCNHCTTCCCTWGG | 2042 | 2643 |
| | CCTWGGACTTTTGGCGGAGGGACCAAG | ACT | | |
| VK1-12_t1_3_9 | CCTGAAGATTTTGCAACTTATTACTGTCAGCAGRNANHCNHCTTC | CAGCAGRNANHCNHCTTCCCTCCT | 2043 | 2644 |
| | CCTCCTACTTTTGGCGGAGGGACCAAG | ACT | | |
| VK1-12_t2_0_9 | CCTGAAGATTTTGCAACTTATTACTGTCAGCAGRNANHCAGTYWC | CAGCAGRNANHCAGTYWCCCTTWC | 2044 | 2645 |
| | CCTTWCACTTTTGGCGGAGGGACCAAG | ACT | | |
| VK1-12_t2_1_9 | CCTGAAGATTTTGCAACTTATTACTGTCAGCAGRNANHCAGTYWC | CAGCAGRNANHCAGTYWCCCTMTC | 2045 | 2646 |
| | CCTMTCACTTTTGGCGGAGGGACCAAG | ACT | | |
| VK1-12_t2_2_9 | CCTGAAGATTTTGCAACTTATTACTGTCAGCAGRNANHCAGTYWC | CAGCAGRNANHCAGTYWCCCTWGG | 2046 | 2647 |
| | CCTWGGACTTTTGGCGGAGGGACCAAG | ACT | | |
| VK1-12_t2_3_9 | CCTGAAGATTTTGCAACTTATTACTGTCAGCAGRNANHCAGTYWC | CAGCAGRNANHCAGTYWCCCTCCT | 2047 | 2648 |
| | CCTCCTACTTTTGGCGGAGGGACCAAG | ACT | | |
| VK1-12_t3_0_9 | CCTGAAGATTTTGCAACTTATTACTGTCAGCAGRNAAATNHCYWC | CAGCAGRNAAATNHCYWCCCTTWC | 2048 | 2649 |
| | CCTTWCACTTTTGGCGGAGGGACCAAG | ACT | | |
| VK1-12_t3_1_9 | CCTGAAGATTTTGCAACTTATTACTGTCAGCAGRNAAATNHCYWC | CAGCAGRNAAATNHCYWCCCTMTC | 2049 | 2650 |
| | CCTMTCACTTTTGGCGGAGGGACCAAG | ACT | | |
| VK1-12_t3_2_9 | CCTGAAGATTTTGCAACTTATTACTGTCAGCAGRNAAATNHCYWC | CAGCAGRNAAATNHCYWCCCTWGG | 2050 | 2651 |
| | CCTWGGACTTTTGGCGGAGGGACCAAG | ACT | | |
| VK1-12_t3_3_9 | CCTGAAGATTTTGCAACTTATTACTGTCAGCAGRNAAATNHCYWC | CAGCAGRNAAATNHCYWCCCTCCT | 2051 | 2652 |
| | CCTCCTACTTTTGGCGGAGGGACCAAG | ACT | | |
| VK1-12_t4_0_9 | CCTGAAGATTTTGCAACTTATTACTGTCAGCAGGCANHCNHCYWC | CAGCAGGCANHCNHCYWCCCTTWC | 2052 | 2653 |
| | CCTTWCACTTTTGGCGGAGGGACCAAG | ACT | | |
| VK1-12_t4_1_9 | CCTGAAGATTTTGCAACTTATTACTGTCAGCAGGCANHCNHCYWC | CAGCAGGCANHCNHCYWCCCTMTC | 2053 | 2654 |
| | CCTMTCACTTTTGGCGGAGGGACCAAG | ACT | | |
| VK1-12_t4_2_9 | CCTGAAGATTTTGCAACTTATTACTGTCAGCAGGCANHCNHCYWC | CAGCAGGCANHCNHCYWCCCTWGG | 2054 | 2655 |
| | CCTWGGACTTTTGGCGGAGGGACCAAG | ACT | | |
| VK1-12_t4_3_9 | CCTGAAGATTTTGCAACTTATTACTGTCAGCAGGCANHCNHCYWC | CAGCAGGCANHCNHCYWCCCTCCT | 2055 | 2656 |
| | CCTCCTACTTTTGGCGGAGGGACCAAG | ACT | | |
| VK1-33_t1_0_9 | CCTGAAGATATTGCAACATATTACTGTCAGCAGBHCNHCNHCCTC | CAGCAGBHCNHCNHCCTCCCTTWC | 2056 | 2657 |
| | CCTTWCACTTTTGGCGGAGGGACCAAG | ACT | | |
| VK1-33_t1_1_9 | CCTGAAGATATTGCAACATATTACTGTCAGCAGBHCNHCNHCCTC | CAGCAGBHCNHCNHCCTCCCTMTC | 2057 | 2658 |
| | CCTMTCACTTTTGGCGGAGGGACCAAG | ACT | | |
| VK1-33_t1_2_9 | CCTGAAGATATTGCAACATATTACTGTCAGCAGBHCNHCNHCCTC | CAGCAGBHCNHCNHCCTCCCTWGG | 2058 | 2659 |
| | CCTWGGACTTTTGGCGGAGGGACCAAG | ACT | | |
| VK1-33_t1_3_9 | CCTGAAGATATTGCAACATATTACTGTCAGCAGBHCNHCNHCCTC | CAGCAGBHCNHCNHCCTCCCTCCT | 2059 | 2660 |
| | CCTCCTACTTTTGGCGGAGGGACCAAG | ACT | | |
| VK1-33_t2_0_9 | CCTGAAGATATTGCAACATATTACTGTCAGCAGBHCNHCAATYWC | CAGCAGBHCNHCAATYWCCCTTWC | 2060 | 2661 |
| | CCTTWCACTTTTGGCGGAGGGACCAAG | ACT | | |
| VK1-33_t2_1_9 | CCTGAAGATATTGCAACATATTACTGTCAGCAGBHCNHCAATYWC | CAGCAGBHCNHCAATYWCCCTMTC | 2061 | 2662 |
| | CCTMTCACTTTTGGCGGAGGGACCAAG | ACT | | |
| VK1-33_t2_2_9 | CCTGAAGATATTGCAACATATTACTGTCAGCAGBHCNHCAATYWC | CAGCAGBHCNHCAATYWCCCTWGG | 2062 | 2663 |
| | CCTWGGACTTTTGGCGGAGGGACCAAG | ACT | | |
| VK1-33_t2_3_9 | CCTGAAGATATTGCAACATATTACTGTCAGCAGBHCNHCAATYWC | CAGCAGBHCNHCAATYWCCCTCCT | 2063 | 2664 |
| | CCTCCTACTTTTGGCGGAGGGACCAAG | ACT | | |
| VK1-33_t3_0_9 | CCTGAAGATATTGCAACATATTACTGTCAGCAGBHCGATNHCYWC | CAGCAGBHCGATNHCYWCCCTTWC | 2064 | 2665 |
| | CCTTWCACTTTTGGCGGAGGGACCAAG | ACT | | |
| VK1-33_t3_1_9 | CCTGAAGATATTGCAACATATTACTGTCAGCAGBHCGATNHCYWC | CAGCAGBHCGATNHCYWCCCTMTC | 2065 | 2666 |
| | CCTMTCACTTTTGGCGGAGGGACCAAG | ACT | | |
| VK1-33_t3_2_9 | CCTGAAGATATTGCAACATATTACTGTCAGCAGBHCGATNHCYWC | CAGCAGBHCGATNHCYWCCCTWGG | 2066 | 2667 |
| | CCTWGGACTTTTGGCGGAGGGACCAAG | ACT | | |
| VK1-33_t3_3_9 | CCTGAAGATATTGCAACATATTACTGTCAGCAGBHCGATNHCYWC | CAGCAGBHCGATNHCYWCCCTCCT | 2067 | 2668 |
| | CCTCCTACTTTTGGCGGAGGGACCAAG | ACT | | |
| VK1-33_t4_0_9 | CCTGAAGATATTGCAACATATTACTGTCAGCAGTACNHCNHCYWC | CAGCAGTACNHCNHCYWCCCTTWC | 2068 | 2669 |
| | CCTTWCACTTTTGGCGGAGGGACCAAG | ACT | | |
| VK1-33_t4_1_9 | CCTGAAGATATTGCAACATATTACTGTCAGCAGTACNHCNHCYWC | CAGCAGTACNHCNHCYWCCCTMTC | 2069 | 2670 |
| | CCTMTCACTTTTGGCGGAGGGACCAAG | ACT | | |
| VK1-33_t4_2_9 | CCTGAAGATATTGCAACATATTACTGTCAGCAGTACNHCNHCYWC | CAGCAGTACNHCNHCYWCCCTWGG | 2070 | 2671 |
| | CCTWGGACTTTTGGCGGAGGGACCAAG | ACT | | |
| VK1-33_t4_3_9 | CCTGAAGATATTGCAACATATTACTGTCAGCAGTACNHCNHCYWC | CAGCAGTACNHCNHCYWCCCTCCT | 2071 | 2672 |
| | CCTCCTACTTTTGGCGGAGGGACCAAG | ACT | | |
| VK1-39_t1_0_9 | CCTGAAGATTTTGCAACTTACTACTGTCAGCAAVNABHCNHCACT | CAGCAAVNABHCNHCACTCCTTWC | 2072 | 320 |
| | CCTTWCACTTTTGGCGGAGGGACCAAG | ACT | | |
| VK1-39_t1_1_9 | CCTGAAGATTTTGCAACTTACTACTGTCAGCAAVNABHCNHCACT | CAGCAAVNABHCNHCACTCCTMTC | 2073 | 2673 |
| | CCTMTCACTTTTGGCGGAGGGACCAAG | ACT | | |
| VK1-39_t1_2_9 | CCTGAAGATTTTGCAACTTACTACTGTCAGCAAVNABHCNHCACT | CAGCAAVNABHCNHCACTCCTWGG | 2074 | 2674 |
| | CCTWGGACTTTTGGCGGAGGGACCAAG | ACT | | |
| VK1-39_t1_3_9 | CCTGAAGATTTTGCAACTTACTACTGTCAGCAAVNABHCNHCACT | CAGCAAVNABHCNHCACTCCTCCT | 2075 | 2675 |
| | CCTCCTACTTTTGGCGGAGGGACCAAG | ACT | | |
| VK1-39_t2_0_9 | CCTGAAGATTTTGCAACTTACTACTGTCAGCAAVNABHCAGTBHC | CAGCAAVNABHCAGTBHCCCTTWC | 2076 | 321 |
| | CCTTWCACTTTTGGCGGAGGGACCAAG | ACT | | |
| VK1-39_t2_1_9 | CCTGAAGATTTTGCAACTTACTACTGTCAGCAAVNABHCAGTBHC | CAGCAAVNABHCAGTBHCCCTMTC | 2077 | 2676 |
| | CCTMTCACTTTTGGCGGAGGGACCAAG | ACT | | |
| VK1-39_t2_2_9 | CCTGAAGATTTTGCAACTTACTACTGTCAGCAAVNABHCAGTBHC | CAGCAAVNABHCAGTBHCCCTWGG | 2078 | 2677 |
| | CCTWGGACTTTTGGCGGAGGGACCAAG | ACT | | |
| VK1-39_t2_3_9 | CCTGAAGATTTTGCAACTTACTACTGTCAGCAAVNABHCAGTBHC | CAGCAAVNABHCAGTBHCCCTCCT | 2079 | 2678 |
| | CCTCCTACTTTTGGCGGAGGGACCAAG | ACT | | |
| VK1-39_t3_0_9 | CCTGAAGATTTTGCAACTTACTACTGTCAGCAAVNATACNHCBHC | CAGCAAVNATACNHCBHCCCTTWC | 2080 | 322 |
| | CCTTWCACTTTTGGCGGAGGGACCAAG | ACT | | |
| VK1-39_t3_1_9 | CCTGAAGATTTTGCAACTTACTACTGTCAGCAAVNATACNHCBHC | CAGCAAVNATACNHCBHCCCTMTC | 2081 | 2679 |
| | CCTMTCACTTTTGGCGGAGGGACCAAG | ACT | | |
| VK1-39_t3_2_9 | CCTGAAGATTTTGCAACTTACTACTGTCAGCAAVNATACNHCBHC | CAGCAAVNATACNHCBHCCCTWGG | 2082 | 2680 |
| | CCTWGGACTTTTGGCGGAGGGACCAAG | ACT | | |
| VK1-39_t3_3_9 | CCTGAAGATTTTGCAACTTACTACTGTCAGCAAVNATACNHCBHC | CAGCAAVNATACNHCBHCCCTCCT | 2083 | 2681 |
| | CCTCCTACTTTTGGCGGAGGGACCAAG | ACT | | |
| VK1-39_t4_0_9 | CCTGAAGATTTTGCAACTTACTACTGTCAGCAAAGCBHCNHCBHC | CAGCAAAGCBHCNHCBHCCCTTWC | 2084 | 323 |
| | CCTTWCACTTTTGGCGGAGGGACCAAG | ACT | | |
| VK1-39_t4_1_9 | CCTGAAGATTTTGCAACTTACTACTGTCAGCAAAGCBHCNHCBHC | CAGCAAAGCBHCNHCBHCCCTMTC | 2085 | 2682 |
| | CCTMTCACTTTTGGCGGAGGGACCAAG | ACT | | |
| VK1-39_t4_2_9 | CCTGAAGATTTTGCAACTTACTACTGTCAGCAAAGCBHCNHCBHC | CAGCAAAGCBHCNHCBHCCCTWGG | 2086 | 2683 |
| | CCTWGGACTTTTGGCGGAGGGACCAAG | ACT | | |
| VK1-39_t4_3_9 | CCTGAAGATTTTGCAACTTACTACTGTCAGCAAAGCBHCNHCBHC | CAGCAAAGCBHCNHCBHCCCTCCT | 2087 | 2684 |
| | CCTCCTACTTTTGGCGGAGGGACCAAG | ACT | | |
| VK2-28_t1_0_9 | GCTGAGGATGTTGGGGTTTATTACTGCATGCAGVNAMNASRMACT | ATGCAGVNAMNASRMACTCCTTWC | 2088 | 2685 |
| | CCTTWCACTTTTGGCGGAGGGACCAAG | ACT | | |
| VK2-28_t1_1_9 | GCTGAGGATGTTGGGGTTTATTACTGCATGCAGVNAMNASRMACT | ATGCAGVNAMNASRMACTCCTMTC | 2089 | 2686 |
| | CCTMTCACTTTTGGCGGAGGGACCAAG | ACT | | |
| VK2-28_t1_2_9 | GCTGAGGATGTTGGGGTTTATTACTGCATGCAGVNAMNASRMACT | ATGCAGVNAMNASRMACTCCTWGG | 2090 | 2687 |
| | CCTWGGACTTTTGGCGGAGGGACCAAG | ACT | | |
| VK2-28_t1_3_9 | GCTGAGGATGTTGGGGTTTATTACTGCATGCAGVNAMNASRMACT | ATGCAGVNAMNASRMACTCCTCCT | 2091 | 2688 |
| | CCTCCTACTTTTGGCGGAGGGACCAAG | ACT | | |
| VK2-28_t2_0_9 | GCTGAGGATGTTGGGGTTTATTACTGCATGCAGVNAMNACAGVBC | ATGCAGVNAMNACAGVBCCCTTWC | 2092 | 2689 |
| | CCTTWCACTTTTGGCGGAGGGACCAAG | ACT | | |
| VK2-28_t2_1_9 | GCTGAGGATGTTGGGGTTTATTACTGCATGCAGVNAMNACAGVBC | ATGCAGVNAMNACAGVBCCCTMTC | 2093 | 2690 |
| | CCTMTCACTTTTGGCGGAGGGACCAAG | ACT | | |
| VK2-28_t2_2_9 | GCTGAGGATGTTGGGGTTTATTACTGCATGCAGVNAMNACAGVBC | ATGCAGVNAMNACAGVBCCCTWGG | 2094 | 2691 |
| | CCTWGGACTTTTGGCGGAGGGACCAAG | ACT | | |
| VK2-28_t2_3_9 | GCTGAGGATGTTGGGGTTTATTACTGCATGCAGVNAMNACAGVBC | ATGCAGVNAMNACAGVBCCCTCCT | 2095 | 2692 |
| | CCTCCTACTTTTGGCGGAGGGACCAAG | ACT | | |
| VK2-28_t3_0_9 | GCTGAGGATGTTGGGGTTTATTACTGCATGCAGVNACTCSRMVBC | ATGCAGVNACTCSRMVBCCCTTWC | 2096 | 2693 |
| | CCTTWCACTTTTGGCGGAGGGACCAAG | ACT | | |
| VK2-28_t3_1_9 | GCTGAGGATGTTGGGGTTTATTACTGCATGCAGVNACTCSRMVBC | ATGCAGVNACTCSRMVBCCCTMTC | 2097 | 2694 |
| | CCTMTCACTTTTGGCGGAGGGACCAAG | ACT | | |
| VK2-28_t3_2_9 | GCTGAGGATGTTGGGGTTTATTACTGCATGCAGVNACTCSRMVBC | ATGCAGVNACTCSRMVBCCCTWGG | 2098 | 2695 |
| | CCTWGGACTTTTGGCGGAGGGACCAAG | ACT | | |
| VK2-28_t3_3_9 | GCTGAGGATGTTGGGGTTTATTACTGCATGCAGVNACTCSRMVBC | ATGCAGVNACTCSRMVBCCCTCCT | 2099 | 2696 |
| | CCTCCTACTTTTGGCGGAGGGACCAAG | ACT | | |
| VK2-28_t4_0_9 | GCTGAGGATGTTGGGGTTTATTACTGCATGCAGGCAMNASRMVBC | ATGCAGGCAMNASRMVBCCCTTWC | 2100 | 2697 |
| | CCTTWCACTTTTGGCGGAGGGACCAAG | ACT | | |
| VK2-28_t4_1_9 | GCTGAGGATGTTGGGGTTTATTACTGCATGCAGGCAMNASRMVBC | ATGCAGGCAMNASRMVBCCCTMTC | 2101 | 2698 |
| | CCTMTCACTTTTGGCGGAGGGACCAAG | ACT | | |
| VK2-28_t4_2_9 | GCTGAGGATGTTGGGGTTTATTACTGCATGCAGGCAMNASRMVBC | ATGCAGGCAMNASRMVBCCCTWGG | 2102 | 2699 |
| | CCTWGGACTTTTGGCGGAGGGACCAAG | ACT | | |
| VK2-28_t4_3_9 | GCTGAGGATGTTGGGGTTTATTACTGCATGCAGGCAMNASRMVBC | ATGCAGGCAMNASRMVBCCCTCCT | 2103 | 2700 |
| | CCTCCTACTTTTGGCGGAGGGACCAAG | ACT | | |
| VK3-11_t1_0_9 | CCTGAAGATTTTGCAGTTTATTACTGTCAGCAGBHCNHCNHCTGG | CAGCAGBHCNHCNHCTGGCCTTWC | 2104 | 2701 |
| | CCTTWCACTTTTGGCGGAGGGACCAAG | ACT | | |
| VK3-11_t1_1_9 | CCTGAAGATTTTGCAGTTTATTACTGTCAGCAGBHCNHCNHCTGG | CAGCAGBHCNHCNHCTGGCCTMTC | 2105 | 2702 |
| | CCTMTCACTTTTGGCGGAGGGACCAAG | ACT | | |
| VK3-11_t1_2_9 | CCTGAAGATTTTGCAGTTTATTACTGTCAGCAGBHCNHCNHCTGG | CAGCAGBHCNHCNHCTGGCCTWGG | 2106 | 2703 |
| | CCTWGGACTTTTGGCGGAGGGACCAAG | ACT | | |
| VK3-11_t1_3_9 | CCTGAAGATTTTGCAGTTTATTACTGTCAGCAGBHCNHCNHCTGG | CAGCAGBHCNHCNHCTGGCCTCCT | 2107 | 2704 |
| | CCTCCTACTTTTGGCGGAGGGACCAAG | ACT | | |
| VK3-11_t2_0_9 | CCTGAAGATTTTGCAGTTTATTACTGTCAGCAGBHCNHCAATYWC | CAGCAGBHCNHCAATYWCCCTTWC | 2108 | 2661 |
| | CCTTWCACTTTTGGCGGAGGGACCAAG | ACT | | |
| VK3-11_t2_1_9 | CCTGAAGATTTTGCAGTTTATTACTGTCAGCAGBHCNHCAATYWC | CAGCAGBHCNHCAATYWCCCTMTC | 2109 | 2662 |
| | CCTMTCACTTTTGGCGGAGGGACCAAG | ACT | | |
| VK3-11_t2_2_9 | CCTGAAGATTTTGCAGTTTATTACTGTCAGCAGBHCNHCAATYWC | CAGCAGBHCNHCAATYWCCCTWGG | 2110 | 2663 |
| | CCTWGGACTTTTGGCGGAGGGACCAAG | ACT | | |
| VK3-11_t2_3_9 | CCTGAAGATTTTGCAGTTTATTACTGTCAGCAGBHCNHCAATYWC | CAGCAGBHCNHCAATYWCCCTCCT | 2111 | 2664 |
| | CCTCCTACTTTTGGCGGAGGGACCAAG | ACT | | |
| VK3-11_t3_0_9 | CCTGAAGATTTTGCAGTTTATTACTGTCAGCAGBHCAGTNHCYWC | CAGCAGBHCAGTNHCYWCCCTTWC | 2112 | 2705 |
| | CCTTWCACTTTTGGCGGAGGGACCAAG | ACT | | |
| VK3-11_t3_1_9 | CCTGAAGATTTTGCAGTTTATTACTGTCAGCAGBHCAGTNHCYWC | CAGCAGBHCAGTNHCYWCCCTMTC | 2113 | 2706 |
| | CCTMTCACTTTTGGCGGAGGGACCAAG | ACT | | |
| VK3-11_t3_2_9 | CCTGAAGATTTTGCAGTTTATTACTGTCAGCAGBHCAGTNHCYWC | CAGCAGBHCAGTNHCYWCCCTWGG | 2114 | 2707 |
| | CCTWGGACTTTTGGCGGAGGGACCAAG | ACT | | |
| VK3-11_t3_3_9 | CCTGAAGATTTTGCAGTTTATTACTGTCAGCAGBHCAGTNHCYWC | CAGCAGBHCAGTNHCYWCCCTCCT | 2115 | 2708 |
| | CCTCCTACTTTTGGCGGAGGGACCAAG | ACT | | |
| VK3-11_t4_0_9 | CCTGAAGATTTTGCAGTTTATTACTGTCAGCAGAGANHCNHCYWC | CAGCAGAGANHCNHCYWCCCTTWC | 2116 | 2709 |
| | CCTTWCACTTTTGGCGGAGGGACCAAG | ACT | | |
| VK3-11_t4_1_9 | CCTGAAGATTTTGCAGTTTATTACTGTCAGCAGAGANHCNHCYWC | CAGCAGAGANHCNHCYWCCCTMTC | 2117 | 2710 |
| | CCTMTCACTTTTGGCGGAGGGACCAAG | ACT | | |
| VK3-11_t4_2_9 | CCTGAAGATTTTGCAGTTTATTACTGTCAGCAGAGANHCNHCYWC | CAGCAGAGANHCNHCYWCCCTWGG | 2118 | 2711 |
| | CCTWGGACTTTTGGCGGAGGGACCAAG | ACT | | |
| VK3-11_t4_3_9 | CCTGAAGATTTTGCAGTTTATTACTGTCAGCAGAGANHCNHCYWC | CAGCAGAGANHCNHCYWCCCTCCT | 2119 | 2712 |
| | CCTCCTACTTTTGGCGGAGGGACCAAG | ACT | | |
| VK3-15_t1_0_9 | CAGTCTGAAGATTTTGCAGTTTATTACTGTCAGCAGBHCNHCNHC | CAGCAGBHCNHCNHCTGGCCTTWC | 2120 | 2701 |
| | TGGCCTTWCACTTTTGGCGGAGGGACCAAG | ACT | | |
| VK3-15_t1_1_9 | CAGTCTGAAGATTTTGCAGTTTATTACTGTCAGCAGBHCNHCNHC | CAGCAGBHCNHCNHCTGGCCTMTC | 2121 | 2702 |
| | TGGCCTMTCACTTTTGGCGGAGGGACCAAG | ACT | | |
| VK3-15_t1_2_9 | CAGTCTGAAGATTTTGCAGTTTATTACTGTCAGCAGBHCNHCNHC | CAGCAGBHCNHCNHCTGGCCTWGG | 2122 | 2703 |
| | TGGCCTWGGACTTTTGGCGGAGGGACCAAG | ACT | | |
| VK3-15_t1_3_9 | CAGTCTGAAGATTTTGCAGTTTATTACTGTCAGCAGBHCNHCNHC | CAGCAGBHCNHCNHCTGGCCTCCT | 2123 | 2704 |
| | TGGCCTCCTACTTTTGGCGGAGGGACCAAG | ACT | | |
| VK3-15_t2_0_9 | CAGTCTGAAGATTTTGCAGTTTATTACTGTCAGCAGBHCNHCAAT | CAGCAGBHCNHCAATYWCCCTTWC | 2124 | 2661 |
| | YWCCCTTWCACTTTTGGCGGAGGGACCAAG | ACT | | |
| VK3-15_t2_1_9 | CAGTCTGAAGATTTTGCAGTTTATTACTGTCAGCAGBHCNHCAAT | CAGCAGBHCNHCAATYWCCCTMTC | 2125 | 2662 |
| | YWCCCTMTCACTTTTGGCGGAGGGACCAAG | ACT | | |
| VK3-15_t2_2_9 | CAGTCTGAAGATTTTGCAGTTTATTACTGTCAGCAGBHCNHCAAT | CAGCAGBHCNHCAATYWCCCTWGG | 2126 | 2663 |
| | YWCCCTWGGACTTTTGGCGGAGGGACCAAG | ACT | | |
| VK3-15_t2_3_9 | CAGTCTGAAGATTTTGCAGTTTATTACTGTCAGCAGBHCNHCAAT | CAGCAGBHCNHCAATYWCCCTCCT | 2127 | 2664 |
| | YWCCCTCCTACTTTTGGCGGAGGGACCAAG | ACT | | |
| VK3-15_t3_0_9 | CAGTCTGAAGATTTTGCAGTTTATTACTGTCAGCAGBHCAATNHC | CAGCAGBHCAATNHCYWCCCTTWC | 2128 | 2713 |
| | YWCCCTTWCACTTTTGGCGGAGGGACCAAG | ACT | | |
| VK3-15_t3_1_9 | CAGTCTGAAGATTTTGCAGTTTATTACTGTCAGCAGBHCAATNHC | CAGCAGBHCAATNHCYWCCCTMTC | 2129 | 2714 |
| | YWCCCTMTCACTTTTGGCGGAGGGACCAAG | ACT | | |
| VK3-15_t3_2_9 | CAGTCTGAAGATTTTGCAGTTTATTACTGTCAGCAGBHCAATNHC | CAGCAGBHCAATNHCYWCCCTWGG | 2130 | 2715 |
| | YWCCCTWGGACTTTTGGCGGAGGGACCAAG | ACT | | |
| VK3-15_t3_3_9 | CAGTCTGAAGATTTTGCAGTTTATTACTGTCAGCAGBHCAATNHC | CAGCAGBHCAATNHCYWCCCTCCT | 2131 | 2716 |
| | YWCCCTCCTACTTTTGGCGGAGGGACCAAG | ACT | | |
| VK3-15_t4_0_9 | CAGTCTGAAGATTTTGCAGTTTATTACTGTCAGCAGTACNHCNHC | CAGCAGTACNHCNHCYWCCCTTWC | 2132 | 2669 |
| | YWCCCTTWCACTTTTGGCGGAGGGACCAAG | ACT | | |
| VK3-15_t4_1_9 | CAGTCTGAAGATTTTGCAGTTTATTACTGTCAGCAGTACNHCNHC | CAGCAGTACNHCNHCYWCCCTMTC | 2133 | 2670 |
| | YWCCCTMTCACTTTTGGCGGAGGGACCAAG | ACT | | |
| VK3-15_t4_2_9 | CAGTCTGAAGATTTTGCAGTTTATTACTGTCAGCAGTACNHCNHC | CAGCAGTACNHCNHCYWCCCTWGG | 2134 | 2671 |
| | YWCCCTWGGACTTTTGGCGGAGGGACCAAG | ACT | | |
| VK3-15_t4_3_9 | CAGTCTGAAGATTTTGCAGTTTATTACTGTCAGCAGTACNHCNHC | CAGCAGTACNHCNHCYWCCCTCCT | 2135 | 2672 |
| | YWCCCTCCTACTTTTGGCGGAGGGACCAAG | ACT | | |
| VK3-20_t1_0_9 | CCTGAAGATTTTGCAGTGTATTACTGTCAGCAGBHCBHCVNCAGT | CAGCAGBHCBHCVNCAGTCCTTWC | 2136 | 2717 |
| | CCTTWCACTTTTGGCGGAGGGACCAAG | ACT | | |
| VK3-20_t1_1_9 | CCTGAAGATTTTGCAGTGTATTACTGTCAGCAGBHCBHCVNCAGT | CAGCAGBHCBHCVNCAGTCCTMTC | 2137 | 2718 |
| | CCTMTCACTTTTGGCGGAGGGACCAAG | ACT | | |
| VK3-20_t1_2_9 | CCTGAAGATTTTGCAGTGTATTACTGTCAGCAGBHCBHCVNCAGT | CAGCAGBHCBHCVNCAGTCCTWGG | 2138 | 2719 |
| | CCTWGGACTTTTGGCGGAGGGACCAAG | ACT | | |
| VK3-20_t1_3_9 | CCTGAAGATTTTGCAGTGTATTACTGTCAGCAGBHCBHCVNCAGT | CAGCAGBHCBHCVNCAGTCCTCCT | 2139 | 2720 |
| | CCTCCTACTTTTGGCGGAGGGACCAAG | ACT | | |
| VK3-20_t2_0_9 | CCTGAAGATTTTGCAGTGTATTACTGTCAGCAGBHCBHCAGTBHC | CAGCAGBHCBHCAGTBHCCCTTWC | 2140 | 2721 |
| | CCTTWCACTTTTGGCGGAGGGACCAAG | ACT | | |
| VK3-20_t2_1_9 | CCTGAAGATTTTGCAGTGTATTACTGTCAGCAGBHCBHCAGTBHC | CAGCAGBHCBHCAGTBHCCCTMTC | 2141 | 2722 |
| | CCTMTCACTTTTGGCGGAGGGACCAAG | ACT | | |
| VK3-20_t2_2_9 | CCTGAAGATTTTGCAGTGTATTACTGTCAGCAGBHCBHCAGTBHC | CAGCAGBHCBHCAGTBHCCCTWGG | 2142 | 2723 |
| | CCTWGGACTTTTGGCGGAGGGACCAAG | ACT | | |
| VK3-20_t2_3_9 | CCTGAAGATTTTGCAGTGTATTACTGTCAGCAGBHCBHCAGTBHC | CAGCAGBHCBHCAGTBHCCCTCCT | 2143 | 2724 |
| | CCTCCTACTTTTGGCGGAGGGACCAAG | ACT | | |
| VK3-20_t3_0_9 | CCTGAAGATTTTGCAGTGTATTACTGTCAGCAGBHCGGAVNCBHC | CAGCAGBHCGGAVNCBHCCCTTWC | 2144 | 2725 |
| | CCTTWCACTTTTGGCGGAGGGACCAAG | ACT | | |
| VK3-20_t3_1_9 | CCTGAAGATTTTGCAGTGTATTACTGTCAGCAGBHCGGAVNCBHC | CAGCAGBHCGGAVNCBHCCCTMTC | 2145 | 2726 |
| | CCTMTCACTTTTGGCGGAGGGACCAAG | ACT | | |
| VK3-20_t3_2_9 | CCTGAAGATTTTGCAGTGTATTACTGTCAGCAGBHCGGAVNCBHC | CAGCAGBHCGGAVNCBHCCCTWGG | 2146 | 2727 |
| | CCTWGGACTTTTGGCGGAGGGACCAAG | ACT | | |
| VK3-20_t3_3_9 | CCTGAAGATTTTGCAGTGTATTACTGTCAGCAGBHCGGAVNCBHC | CAGCAGBHCGGAVNCBHCCCTCCT | 2147 | 2728 |
| | CCTCCTACTTTTGGCGGAGGGACCAAG | ACT | | |
| VK3-20_t4_0_9 | CCTGAAGATTTTGCAGTGTATTACTGTCAGCAGTACBHCVNCBHC | CAGCAGTACBHCVNCBHCCCTTWC | 2148 | 2729 |
| | CCTTWCACTTTTGGCGGAGGGACCAAG | ACT | | |
| VK3-20_t4_1_9 | CCTGAAGATTTTGCAGTGTATTACTGTCAGCAGTACBHCVNCBHC | CAGCAGTACBHCVNCBHCCCTMTC | 2149 | 2730 |
| | CCTMTCACTTTTGGCGGAGGGACCAAG | ACT | | |
| VK3-20_t4_2_9 | CCTGAAGATTTTGCAGTGTATTACTGTCAGCAGTACBHCVNCBHC | CAGCAGTACBHCVNCBHCCCTWGG | 2150 | 2731 |
| | CCTWGGACTTTTGGCGGAGGGACCAAG | ACT | | |
| VK3-20_t4_3_9 | CCTGAAGATTTTGCAGTGTATTACTGTCAGCAGTACBHCVNCBHC | CAGCAGTACBHCVNCBHCCCTCCT | 2151 | 2732 |
| | CCTCCTACTTTTGGCGGAGGGACCAAG | ACT | | |
| VK4-01_t1_0_9 | GCTGAAGATGTGGCAGTTTATTACTGTCAGCAGBHCBHCNHCACT | CAGCAGBHCBHCNHCACTCCTTWC | 2152 | 2733 |
| | CCTTWCACTTTTGGCGGAGGGACCAAG | ACT | | |
| VK4-01_t1_1_9 | GCTGAAGATGTGGCAGTTTATTACTGTCAGCAGBHCBHCNHCACT | CAGCAGBHCBHCNHCACTCCTMTC | 2153 | 2734 |
| | CCTMTCACTTTTGGCGGAGGGACCAAG | ACT | | |
| VK4-01_t1_2_9 | GCTGAAGATGTGGCAGTTTATTACTGTCAGCAGBHCBHCNHCACT | CAGCAGBHCBHCNHCACTCCTWGG | 2154 | 2735 |
| | CCTWGGACTTTTGGCGGAGGGACCAAG | ACT | | |
| VK4-01_t1_3_9 | GCTGAAGATGTGGCAGTTTATTACTGTCAGCAGBHCBHCNHCACT | CAGCAGBHCBHCNHCACTCCTCCT | 2155 | 2736 |
| | CCTCCTACTTTTGGCGGAGGGACCAAG | ACT | | |
| VK4-01_t2_0_9 | GCTGAAGATGTGGCAGTTTATTACTGTCAGCAGBHCBHCAGTBHC | CAGCAGBHCBHCAGTBHCCCTTWC | 2156 | 2721 |
| | CCTTWCACTTTTGGCGGAGGGACCAAG | ACT | | |
| VK4-01_t2_1_9 | GCTGAAGATGTGGCAGTTTATTACTGTCAGCAGBHCBHCAGTBHC | CAGCAGBHCBHCAGTBHCCCTMTC | 2157 | 2722 |
| | CCTMTCACTTTTGGCGGAGGGACCAAG | ACT | | |
| VK4-01_t2_2_9 | GCTGAAGATGTGGCAGTTTATTACTGTCAGCAGBHCBHCAGTBHC | CAGCAGBHCBHCAGTBHCCCTWGG | 2158 | 2723 |
| | CCTWGGACTTTTGGCGGAGGGACCAAG | ACT | | |
| VK4-01_t2_3_9 | GCTGAAGATGTGGCAGTTTATTACTGTCAGCAGBHCBHCAGTBHC | CAGCAGBHCBHCAGTBHCCCTCCT | 2159 | 2724 |
| | CCTCCTACTTTTGGCGGAGGGACCAAG | ACT | | |
| VK4-01_t3_0_9 | GCTGAAGATGTGGCAGTTTATTACTGTCAGCAGBHCTACNHCBHC | CAGCAGBHCTACNHCBHCCCTTWC | 2160 | 2737 |
| | CCTTWCACTTTTGGCGGAGGGACCAAG | ACT | | |
| VK4-01_t3_1_9 | GCTGAAGATGTGGCAGTTTATTACTGTCAGCAGBHCTACNHCBHC | CAGCAGBHCTACNHCBHCCCTMTC | 2161 | 2738 |
| | CCTMTCACTTTTGGCGGAGGGACCAAG | ACT | | |
| VK4-01_t3_2_9 | GCTGAAGATGTGGCAGTTTATTACTGTCAGCAGBHCTACNHCBHC | CAGCAGBHCTACNHCBHCCCTWGG | 2162 | 2739 |
| | CCTWGGACTTTTGGCGGAGGGACCAAG | ACT | | |
| VK4-01_t3_3_9 | GCTGAAGATGTGGCAGTTTATTACTGTCAGCAGBHCTACNHCBHC | CAGCAGBHCTACNHCBHCCCTCCT | 2163 | 2740 |
| | CCTCCTACTTTTGGCGGAGGGACCAAG | ACT | | |
| VK4-01_t4_0_9 | GCTGAAGATGTGGCAGTTTATTACTGTCAGCAGTACBHCNHCBHC | CAGCAGTACBHCNHCBHCCCTTWC | 2164 | 2741 |
| | CCTTWCACTTTTGGCGGAGGGACCAAG | ACT | | |
| VK4-01_t4_1_9 | GCTGAAGATGTGGCAGTTTATTACTGTCAGCAGTACBHCNHCBHC | CAGCAGTACBHCNHCBHCCCTMTC | 2165 | 2742 |
| | CCTMTCACTTTTGGCGGAGGGACCAAG | ACT | | |
| VK4-01_t4_2_9 | GCTGAAGATGTGGCAGTTTATTACTGTCAGCAGTACBHCNHCBHC | CAGCAGTACBHCNHCBHCCCTWGG | 2166 | 2743 |
| | CCTWGGACTTTTGGCGGAGGGACCAAG | ACT | | |
| VK4-01_t4_3_9 | GCTGAAGATGTGGCAGTTTATTACTGTCAGCAGTACBHCNHCBHC | CAGCAGTACBHCNHCBHCCCTCCT | 2167 | 2744 |
| | CCTCCTACTTTTGGCGGAGGGACCAAG | ACT | | |

TABLE 7
Oligonucleotide sequences for exemplary VK jumping dimer and trimer sequences with CDRL3 length 10.

| | | | | |
|---|---|---|---|---|
| | | Portion of | | SEQ ID |
| | | Oligonucleotide | SEQ ID | NO |
| | | Corresponding to | NO | (CDRL3 |
| Name | Sequence of Synthesized Oligonucleotide | CDRL3 Proper | (Oligo) | Portion) |

Jumping Dimer

| | | | | |
|---|---|---|---|---|
| VK1-05_1_0_10 | CCTGATGATTTTGCAACTTATTACTGCSWMSWMTACAATAG | SWMSWMTACAATAGTTACYC | 2745 | 3213 |
| | TTACYCTCCTTWCACTTTTGGCGGAGGGACCAAG | TCCTTWCACT | | |
| VK1-05_10_0_10 | CCTGATGATTTTGCAACTTATTACTGCCAGCAGBHCVRMAG | CAGCAGBHCVRMAGTTACYC | 2746 | 3214 |
| | TTACYCTCCTTWCACTTTTGGCGGAGGGACCAAG | TCCTTWCACT | | |
| VK1-05_11_0_10 | CCTGATGATTTTGCAACTTATTACTGCCAGCAGBHCAATMB | CAGCAGBHCAATMBCTACYC | 2747 | 3215 |
| | CTACYCTCCTTWCACTTTTGGCGGAGGGACCAAG | TCCTTWCACT | | |
| VK1-05_12_0_10 | CCTGATGATTTTGCAACTTATTACTGCCAGCAGBHCAATAG | CAGCAGBHCAATAGTYWCYC | 2748 | 3216 |
| | TYWCYCTCCTTWCACTTTTGGCGGAGGGACCAAG | TCCTTWCACT | | |
| VK1-05_13_0_10 | CCTGATGATTTTGCAACTTATTACTGCCAGCAGTACVRMMB | CAGCAGTACVRMMBCTACYC | 2749 | 3217 |
| | CTACYCTCCTTWCACTTTTGGCGGAGGGACCAAG | TCCTTWCACT | | |
| VK1-05_14_0_10 | CCTGATGATTTTGCAACTTATTACTGCCAGCAGTACVRMAG | CAGCAGTACVRMAGTYWCYC | 2750 | 3218 |
| | TYWCYCTCCTTWCACTTTTGGCGGAGGGACCAAG | TCCTTWCACT | | |
| VK1-05_15_0_10 | CCTGATGATTTTGCAACTTATTACTGCCAGCAGTACAATMB | CAGCAGTACAATMBCYWCYC | 2751 | 3219 |
| | CYWCYCTCCTTWCACTTTTGGCGGAGGGACCAAG | TCCTTWCACT | | |
| VK1-05_2_0_10 | CCTGATGATTTTGCAACTTATTACTGCSWMCAGBHCAATAG | SWMCAGBHCAATAGTTACYC | 2752 | 3220 |
| | TTACYCTCCTTWCACTTTTGGCGGAGGGACCAAG | TCCTTWCACT | | |
| VK1-05_3_0_10 | CCTGATGATTTTGCAACTTATTACTGCSWMCAGTACVRMAG | SWMCAGTACVRMAGTTACYC | 2753 | 3221 |
| | TTACYCTCCTTWCACTTTTGGCGGAGGGACCAAG | TCCTTWCACT | | |
| VK1-05_4_0_10 | CCTGATGATTTTGCAACTTATTACTGCSWMCAGTACAATMB | SWMCAGTACAATMBCTACYC | 2754 | 3222 |
| | CTACYCTCCTTWCACTTTTGGCGGAGGGACCAAG | TCCTTWCACT | | |
| VK1-05_5_0_10 | CCTGATGATTTTGCAACTTATTACTGCSWMCAGTACAATAG | SWMCAGTACAATAGTYWCYC | 2755 | 3223 |
| | TYWCYCTCCTTWCACTTTTGGCGGAGGGACCAAG | TCCTTWCACT | | |
| VK1-05_6_0_10 | CCTGATGATTTTGCAACTTATTACTGCCAGSWMBHCAATAG | CAGSWMBHCAATAGTTACYC | 2756 | 3224 |
| | TTACYCTCCTTWCACTTTTGGCGGAGGGACCAAG | TCCTTWCACT | | |
| VK1-05_7_0_10 | CCTGATGATTTTGCAACTTATTACTGCCAGSWMTACVRMAG | CAGSWMTACVRMAGTTACYC | 2757 | 3225 |
| | TTACYCTCCTTWCACTTTTGGCGGAGGGACCAAG | TCCTTWCACT | | |
| VK1-05_8_0_10 | CCTGATGATTTTGCAACTTATTACTGCCAGSWMTACAATMB | CAGSWMTACAATMBCTACYC | 2758 | 3226 |
| | CTACYCTCCTTWCACTTTTGGCGGAGGGACCAAG | TCCTTWCACT | | |
| VK1-05_9_0_10 | CCTGATGATTTTGCAACTTATTACTGCCAGSWMTACAATAG | CAGSWMTACAATAGTYWCYC | 2759 | 3227 |
| | TYWCYCTCCTTWCACTTTTGGCGGAGGGACCAAG | TCCTTWCACT | | |
| VK1-05_1_1_10 | CCTGATGATTTTGCAACTTATTACTGCSWMSWMTACAATAG | SWMSWMTACAATAGTTACYC | 2760 | 3228 |
| | TTACYCTCCTMTCACTTTTGGCGGAGGGACCAAG | TCCTMTCACT | | |
| VK1-05_10_1_10 | CCTGATGATTTTGCAACTTATTACTGCCAGCAGBHCVRMAG | CAGCAGBHCVRMAGTTACYC | 2761 | 3229 |
| | TTACYCTCCTMTCACTTTTGGCGGAGGGACCAAG | TCCTMTCACT | | |
| VK1-05_11_1_10 | CCTGATGATTTTGCAACTTATTACTGCCAGCAGBHCAATMB | CAGCAGBHCAATMBCTACYC | 2762 | 3230 |
| | CTACYCTCCTMTCACTTTTGGCGGAGGGACCAAG | TCCTMTCACT | | |
| VK1-05_12_1_10 | CCTGATGATTTTGCAACTTATTACTGCCAGCAGBHCAATAG | CAGCAGBHCAATAGTYWCYC | 2763 | 3231 |
| | TYWCYCTCCTMTCACTTTTGGCGGAGGGACCAAG | TCCTMTCACT | | |
| VK1-05_13_1_10 | CCTGATGATTTTGCAACTTATTACTGCCAGCAGTACVRMMB | CAGCAGTACVRMMBCTACYC | 2764 | 3232 |
| | CTACYCTCCTMTCACTTTTGGCGGAGGGACCAAG | TCCTMTCACT | | |
| VK1-05_14_1_10 | CCTGATGATTTTGCAACTTATTACTGCCAGCAGTACVRMAG | CAGCAGTACVRMAGTYWCYC | 2765 | 3233 |
| | TYWCYCTCCTMTCACTTTTGGCGGAGGGACCAAG | TCCTMTCACT | | |
| VK1-05_15_1_10 | CCTGATGATTTTGCAACTTATTACTGCCAGCAGTACAATMB | CAGCAGTACAATMBCYWCYC | 2766 | 3234 |
| | CYWCYCTCCTMTCACTTTTGGCGGAGGGACCAAG | TCCTMTCACT | | |
| VK1-05_2_1_10 | CCTGATGATTTTGCAACTTATTACTGCSWMCAGBHCAATAG | SWMCAGBHCAATAGTTACYC | 2767 | 3235 |
| | TTACYCTCCTMTCACTTTTGGCGGAGGGACCAAG | TCCTMTCACT | | |
| VK1-05_3_1_10 | CCTGATGATTTTGCAACTTATTACTGCSWMCAGTACVRMAG | SWMCAGTACVRMAGTTACYC | 2768 | 3236 |
| | TTACYCTCCTMTCACTTTTGGCGGAGGGACCAAG | TCCTMTCACT | | |
| VK1-05_4_1_10 | CCTGATGATTTTGCAACTTATTACTGCSWMCAGTACAATMB | SWMCAGTACAATMBCTACYC | 2769 | 3237 |
| | CTACYCTCCTMTCACTTTTGGCGGAGGGACCAAG | TCCTMTCACT | | |
| VK1-05_5_1_10 | CCTGATGATTTTGCAACTTATTACTGCSWMCAGTACAATAG | SWMCAGTACAATAGTYWCYC | 2770 | 3238 |
| | TYWCYCTCCTMTCACTTTTGGCGGAGGGACCAAG | TCCTMTCACT | | |
| VK1-05_6_1_10 | CCTGATGATTTTGCAACTTATTACTGCCAGSWMBHCAATAG | CAGSWMBHCAATAGTTACYC | 2771 | 3239 |
| | TTACYCTCCTMTCACTTTTGGCGGAGGGACCAAG | TCCTMTCACT | | |
| VK1-05_7_1_10 | CCTGATGATTTTGCAACTTATTACTGCCAGSWMTACVRMAG | CAGSWMTACVRMAGTTACYC | 2772 | 3240 |
| | TTACYCTCCTMTCACTTTTGGCGGAGGGACCAAG | TCCTMTCACT | | |
| VK1-05_8_1_10 | CCTGATGATTTTGCAACTTATTACTGCCAGSWMTACAATMB | CAGSWMTACAATMBCTACYC | 2773 | 3241 |
| | CTACYCTCCTMTCACTTTTGGCGGAGGGACCAAG | TCCTMTCACT | | |
| VK1-05_9_1_10 | CCTGATGATTTTGCAACTTATTACTGCCAGSWMTACAATAG | CAGSWMTACAATAGTYWCYC | 2774 | 3242 |
| | TYWCYCTCCTMTCACTTTTGGCGGAGGGACCAAG | TCCTMTCACT | | |
| VK1-05_1_2_10 | CCTGATGATTTTGCAACTTATTACTGCSWMSWMTACAATAG | SWMSWMTACAATAGTTACYC | 2775 | 3243 |
| | TTACYCTCCTWGGACTTTTGGCGGAGGGACCAAG | TCCTWGGACT | | |
| VK1-05_10_2_10 | CCTGATGATTTTGCAACTTATTACTGCCAGCAGBHCVRMAG | CAGCAGBHCVRMAGTTACYC | 2776 | 3244 |
| | TTACYCTCCTWGGACTTTTGGCGGAGGGACCAAG | TCCTWGGACT | | |
| VK1-05_11_2_10 | CCTGATGATTTTGCAACTTATTACTGCCAGCAGBHCAATMB | CAGCAGBHCAATMBCTACYC | 2777 | 3245 |
| | CTACYCTCCTWGGACTTTTGGCGGAGGGACCAAG | TCCTWGGACT | | |
| VK1-05_12_2_10 | CCTGATGATTTTGCAACTTATTACTGCCAGCAGBHCAATAG | CAGCAGBHCAATAGTYWCYC | 2778 | 3246 |
| | TYWCYCTCCTWGGACTTTTGGCGGAGGGACCAAG | TCCTWGGACT | | |
| VK1-05_13_2_10 | CCTGATGATTTTGCAACTTATTACTGCCAGCAGTACVRMMB | CAGCAGTACVRMMBCTACYC | 2779 | 3247 |
| | CTACYCTCCTWGGACTTTTGGCGGAGGGACCAAG | TCCTWGGACT | | |
| VK1-05_14_2_10 | CCTGATGATTTTGCAACTTATTACTGCCAGCAGTACVRMAG | CAGCAGTACVRMAGTYWCYC | 2780 | 3248 |
| | TYWCYCTCCTWGGACTTTTGGCGGAGGGACCAAG | TCCTWGGACT | | |
| VK1-05_15_2_10 | CCTGATGATTTTGCAACTTATTACTGCCAGCAGTACAATMB | CAGCAGTACAATMBCYWCYC | 2781 | 3249 |
| | CYWCYCTCCTWGGACTTTTGGCGGAGGGACCAAG | TCCTWGGACT | | |
| VK1-05_2_2_10 | CCTGATGATTTTGCAACTTATTACTGCSWMCAGBHCAATAG | SWMCAGBHCAATAGTTACYC | 2782 | 3250 |
| | TTACYCTCCTWGGACTTTTGGCGGAGGGACCAAG | TCCTWGGACT | | |
| VK1-05_3_2_10 | CCTGATGATTTTGCAACTTATTACTGCSWMCAGTACVRMAG | SWMCAGTACVRMAGTTACYC | 2783 | 3251 |
| | TTACYCTCCTWGGACTTTTGGCGGAGGGACCAAG | TCCTWGGACT | | |
| VK1-05_4_2_10 | CCTGATGATTTTGCAACTTATTACTGCSWMCAGTACAATMB | SWMCAGTACAATMBCTACYC | 2784 | 3252 |
| | CTACYCTCCTWGGACTTTTGGCGGAGGGACCAAG | TCCTWGGACT | | |
| VK1-05_5_2_10 | CCTGATGATTTTGCAACTTATTACTGCSWMCAGTACAATAG | SWMCAGTACAATAGTYWCYC | 2785 | 3253 |
| | TYWCYCTCCTWGGACTTTTGGCGGAGGGACCAAG | TCCTWGGACT | | |
| VK1-05_6_2_10 | CCTGATGATTTTGCAACTTATTACTGCCAGSWMBHCAATAG | CAGSWMBHCAATAGTTACYC | 2786 | 3254 |
| | TTACYCTCCTWGGACTTTTGGCGGAGGGACCAAG | TCCTWGGACT | | |
| VK1-05_7_2_10 | CCTGATGATTTTGCAACTTATTACTGCCAGSWMTACVRMAG | CAGSWMTACVRMAGTTACYC | 2787 | 3255 |
| | TTACYCTCCTWGGACTTTTGGCGGAGGGACCAAG | TCCTWGGACT | | |
| VK1-05_8_2_10 | CCTGATGATTTTGCAACTTATTACTGCCAGSWMTACAATMB | CAGSWMTACAATMBCTACYC | 2788 | 3256 |
| | CTACYCTCCTWGGACTTTTGGCGGAGGGACCAAG | TCCTWGGACT | | |
| VK1-05_9_2_10 | CCTGATGATTTTGCAACTTATTACTGCCAGSWMTACAATAG | CAGSWMTACAATAGTYWCYC | 2789 | 3257 |
| | TYWCYCTCCTWGGACTTTTGGCGGAGGGACCAAG | TCCTWGGACT | | |
| VK1-12_1_0_10 | CCTGAAGATTTTGCAACTTATTACTGTSWMSWMGCAAATAG | SWMSWMGCAAATAGTTTCCC | 2790 | 3258 |
| | TTTCCCTCCTTWCACTTTTGGCGGAGGGACCAAG | TCCTTWCACT | | |
| VK1-12_10_0_10 | CCTGAAGATTTTGCAACTTATTACTGTCAGCAGRNANHCAG | CAGCAGRNANHCAGTTTCCC | 2791 | 3259 |
| | TTTCCCTCCTTWCACTTTTGGCGGAGGGACCAAG | TCCTTWCACT | | |
| VK1-12_11_0_10 | CCTGAAGATTTTGCAACTTATTACTGTCAGCAGRNAAATNH | CAGCAGRNAAATNHCTTCCC | 2792 | 3260 |
| | CTTCCCTCCTTWCACTTTTGGCGGAGGGACCAAG | TCCTTWCACT | | |
| VK1-12_12_0_10 | CCTGAAGATTTTGCAACTTATTACTGTCAGCAGRNAAATAG | CAGCAGRNAAATAGTYWCCC | 2793 | 3261 |
| | TYWCCCTCCTTWCACTTTTGGCGGAGGGACCAAG | TCCTTWCACT | | |
| VK1-12_13_0_10 | CCTGAAGATTTTGCAACTTATTACTGTCAGCAGGCANHCNH | CAGCAGGCANHCNHCTTCCC | 2794 | 3262 |
| | CTTCCCTCCTTWCACTTTTGGCGGAGGGACCAAG | TCCTTWCACT | | |
| VK1-12_14_0_10 | CCTGAAGATTTTGCAACTTATTACTGTCAGCAGGCANHCAG | CAGCAGGCANHCAGTYWCCC | 2795 | 3263 |
| | TYWCCCTCCTTWCACTTTTGGCGGAGGGACCAAG | TCCTTWCACT | | |
| VK1-12_15_0_10 | CCTGAAGATTTTGCAACTTATTACTGTCAGCAGGCAAATNH | CAGCAGGCAAATNHCYWCCC | 2796 | 3264 |
| | CYWCCCTCCTTWCACTTTTGGCGGAGGGACCAAG | TCCTTWCACT | | |
| VK1-12_2_0_10 | CCTGAAGATTTTGCAACTTATTACTGTSWMCAGRNAAATAG | SWMCAGRNAAATAGTTTCCC | 2797 | 3265 |
| | TTTCCCTCCTTWCACTTTTGGCGGAGGGACCAAG | TCCTTWCACT | | |
| VK1-12_3_0_10 | CCTGAAGATTTTGCAACTTATTACTGTSWMCAGGCANHCAG | SWMCAGGCANHCAGTTTCCC | 2798 | 3266 |
| | TTTCCCTCCTTWCACTTTTGGCGGAGGGACCAAG | TCCTTWCACT | | |
| VK1-12_4_0_10 | CCTGAAGATTTTGCAACTTATTACTGTSWMCAGGCAAATNH | SWMCAGGCAAATNHCTTCCC | 2799 | 3267 |
| | CTTCCCTCCTTWCACTTTTGGCGGAGGGACCAAG | TCCTTWCACT | | |
| VK1-12_5_0_10 | CCTGAAGATTTTGCAACTTATTACTGTSWMCAGGCAAATAG | SWMCAGGCAAATAGTYWCCC | 2800 | 3268 |
| | TYWCCCTCCTTWCACTTTTGGCGGAGGGACCAAG | TCCTTWCACT | | |
| VK1-12_6_0_10 | CCTGAAGATTTTGCAACTTATTACTGTCAGSWMRNAAATAG | CAGSWMRNAAATAGTTTCCC | 2801 | 3269 |
| | TTTCCCTCCTTWCACTTTTGGCGGAGGGACCAAG | TCCTTWCACT | | |
| VK1-12_7_0_10 | CCTGAAGATTTTGCAACTTATTACTGTCAGSWMGCANHCAG | CAGSWMGCANHCAGTTTCCC | 2802 | 3270 |
| | TTTCCCTCCTTWCACTTTTGGCGGAGGGACCAAG | TCCTTWCACT | | |
| VK1-12_8_0_10 | CCTGAAGATTTTGCAACTTATTACTGTCAGSWMGCAAATNH | CAGSWMGCAAATNHCTTCCC | 2803 | 3271 |
| | CTTCCCTCCTTWCACTTTTGGCGGAGGGACCAAG | TCCTTWCACT | | |
| VK1-12_9_0_10 | CCTGAAGATTTTGCAACTTATTACTGTCAGSWMGCAAATAG | CAGSWMGCAAATAGTYWCCC | 2804 | 3272 |
| | TYWCCCTCCTTWCACTTTTGGCGGAGGGACCAAG | TCCTTWCACT | | |
| VK1-12_1_1_10 | CCTGAAGATTTTGCAACTTATTACTGTSWMSWMGCAAATAG | SWMSWMGCAAATAGTTTCCC | 2805 | 3273 |
| | TTTCCCTCCTMTCACTTTTGGCGGAGGGACCAAG | TCCTMTCACT | | |
| VK1-12_10_1_10 | CCTGAAGATTTTGCAACTTATTACTGTCAGCAGRNANHCAG | CAGCAGRNANHCAGTTTCCC | 2806 | 3274 |
| | TTTCCCTCCTMTCACTTTTGGCGGAGGGACCAAG | TCCTMTCACT | | |
| VK1-12_11_1_10 | CCTGAAGATTTTGCAACTTATTACTGTCAGCAGRNAAATNH | CAGCAGRNAAATNHCTTCCC | 2807 | 3275 |
| | CTTCCCTCCTMTCACTTTTGGCGGAGGGACCAAG | TCCTMTCACT | | |
| VK1-12_12_1_10 | CCTGAAGATTTTGCAACTTATTACTGTCAGCAGRNAAATAG | CAGCAGRNAAATAGTYWCCC | 2808 | 3276 |
| | TYWCCCTCCTMTCACTTTTGGCGGAGGGACCAAG | TCCTMTCACT | | |
| VK1-12_13_1_10 | CCTGAAGATTTTGCAACTTATTACTGTCAGCAGGCANHCNH | CAGCAGGCANHCNHCTTCCC | 2809 | 3277 |
| | CTTCCCTCCTMTCACTTTTGGCGGAGGGACCAAG | TCCTMTCACT | | |
| VK1-12_14_1_10 | CCTGAAGATTTTGCAACTTATTACTGTCAGCAGGCANHCAG | CAGCAGGCANHCAGTYWCCC | 2810 | 3278 |
| | TYWCCCTCCTMTCACTTTTGGCGGAGGGACCAAG | TCCTMTCACT | | |
| VK1-12_15_1_10 | CCTGAAGATTTTGCAACTTATTACTGTCAGCAGGCAAATNH | CAGCAGGCAAATNHCYWCCC | 2811 | 3279 |
| | CYWCCCTCCTMTCACTTTTGGCGGAGGGACCAAG | TCCTMTCACT | | |
| VK1-12_2_1_10 | CCTGAAGATTTTGCAACTTATTACTGTSWMCAGRNAAATAG | SWMCAGRNAAATAGTTTCCC | 2812 | 3280 |
| | TTTCCCTCCTMTCACTTTTGGCGGAGGGACCAAG | TCCTMTCACT | | |
| VK1-12_3_1_10 | CCTGAAGATTTTGCAACTTATTACTGTSWMCAGGCANHCAG | SWMCAGGCANHCAGTTTCCC | 2813 | 3281 |
| | TTTCCCTCCTMTCACTTTTGGCGGAGGGACCAAG | TCCTMTCACT | | |
| VK1-12_4_1_10 | CCTGAAGATTTTGCAACTTATTACTGTSWMCAGGCAAATNH | SWMCAGGCAAATNHCTTCCC | 2814 | 3282 |
| | CTTCCCTCCTMTCACTTTTGGCGGAGGGACCAAG | TCCTMTCACT | | |
| VK1-12_5_1_10 | CCTGAAGATTTTGCAACTTATTACTGTSWMCAGGCAAATAG | SWMCAGGCAAATAGTYWCCC | 2815 | 3283 |
| | TYWCCCTCCTMTCACTTTTGGCGGAGGGACCAAG | TCCTMTCACT | | |
| VK1-12_6_1_10 | CCTGAAGATTTTGCAACTTATTACTGTCAGSWMRNAAATAG | CAGSWMRNAAATAGTTTCCC | 2816 | 3284 |
| | TTTCCCTCCTMTCACTTTTGGCGGAGGGACCAAG | TCCTMTCACT | | |
| VK1-12_7_1_10 | CCTGAAGATTTTGCAACTTATTACTGTCAGSWMGCANHCAG | CAGSWMGCANHCAGTTTCCC | 2817 | 3285 |
| | TTTCCCTCCTMTCACTTTTGGCGGAGGGACCAAG | TCCTMTCACT | | |
| VK1-12_8_1_10 | CCTGAAGATTTTGCAACTTATTACTGTCAGSWMGCAAATNH | CAGSWMGCAAATNHCTTCCC | 2818 | 3286 |
| | CTTCCCTCCTMTCACTTTTGGCGGAGGGACCAAG | TCCTMTCACT | | |
| VK1-12_9_1_10 | CCTGAAGATTTTGCAACTTATTACTGTCAGSWMGCAAATAG | CAGSWMGCAAATAGTYWCCC | 2819 | 3287 |
| | TYWCCCTCCTMTCACTTTTGGCGGAGGGACCAAG | TCCTMTCACT | | |
| VK1-12_1_2_10 | CCTGAAGATTTTGCAACTTATTACTGTSWMSWMGCAAATAG | SWMSWMGCAAATAGTTTCCC | 2820 | 3288 |
| | TTTCCCTCCTWGGACTTTTGGCGGAGGGACCAAG | TCCTWGGACT | | |
| VK1-12_10_2_10 | CCTGAAGATTTTGCAACTTATTACTGTCAGCAGRNANHCAG | CAGCAGRNANHCAGTTTCCC | 2821 | 3289 |
| | TTTCCCTCCTWGGACTTTTGGCGGAGGGACCAAG | TCCTWGGACT | | |
| VK1-12_11_2_10 | CCTGAAGATTTTGCAACTTATTACTGTCAGCAGRNAAATNH | CAGCAGRNAAATNHCTTCCC | 2822 | 3290 |
| | CTTCCCTCCTWGGACTTTTGGCGGAGGGACCAAG | TCCTWGGACT | | |
| VK1-12_12_2_10 | CCTGAAGATTTTGCAACTTATTACTGTCAGCAGRNAAATAG | CAGCAGRNAAATAGTYWCCC | 2823 | 3291 |
| | TYWCCCTCCTWGGACTTTTGGCGGAGGGACCAAG | TCCTWGGACT | | |
| VK1-12_13_2_10 | CCTGAAGATTTTGCAACTTATTACTGTCAGCAGGCANHCNH | CAGCAGGCANHCNHCTTCCC | 2824 | 3292 |
| | CTTCCCTCCTWGGACTTTTGGCGGAGGGACCAAG | TCCTWGGACT | | |
| VK1-12_14_2_10 | CCTGAAGATTTTGCAACTTATTACTGTCAGCAGGCANHCAG | CAGCAGGCANHCAGTYWCCC | 2825 | 3293 |
| | TYWCCCTCCTWGGACTTTTGGCGGAGGGACCAAG | TCCTWGGACT | | |
| VK1-12_15_2_10 | CCTGAAGATTTTGCAACTTATTACTGTCAGCAGGCAAATNH | CAGCAGGCAAATNHCYWCCC | 2826 | 3294 |
| | CYWCCCTCCTWGGACTTTTGGCGGAGGGACCAAG | TCCTWGGACT | | |
| VK1-12_2_2_10 | CCTGAAGATTTTGCAACTTATTACTGTSWMCAGRNAAATAG | SWMCAGRNAAATAGTTTCCC | 2827 | 3295 |
| | TTTCCCTCCTWGGACTTTTGGCGGAGGGACCAAG | TCCTWGGACT | | |
| VK1-12_3_2_10 | CCTGAAGATTTTGCAACTTATTACTGTSWMCAGGCANHCAG | SWMCAGGCANHCAGTTTCCC | 2828 | 3296 |
| | TTTCCCTCCTWGGACTTTTGGCGGAGGGACCAAG | TCCTWGGACT | | |
| VK1-12_4_2_10 | CCTGAAGATTTTGCAACTTATTACTGTSWMCAGGCAAATNH | SWMCAGGCAAATNHCTTCCC | 2829 | 3297 |
| | CTTCCCTCCTWGGACTTTTGGCGGAGGGACCAAG | TCCTWGGACT | | |
| VK1-12_5_2_10 | CCTGAAGATTTTGCAACTTATTACTGTSWMCAGGCAAATAG | SWMCAGGCAAATAGTYWCCC | 2830 | 3298 |
| | TYWCCCTCCTWGGACTTTTGGCGGAGGGACCAAG | TCCTWGGACT | | |
| VK1-12_6_2_10 | CCTGAAGATTTTGCAACTTATTACTGTCAGSWMRNAAATAG | CAGSWMRNAAATAGTTTCCC | 2831 | 3299 |
| | TTTCCCTCCTWGGACTTTTGGCGGAGGGACCAAG | TCCTWGGACT | | |
| VK1-12_7_2_10 | CCTGAAGATTTTGCAACTTATTACTGTCAGSWMGCANHCAG | CAGSWMGCANHCAGTTTCCC | 2832 | 3300 |
| | TTTCCCTCCTWGGACTTTTGGCGGAGGGACCAAG | TCCTWGGACT | | |
| VK1-12_8_2_10 | CCTGAAGATTTTGCAACTTATTACTGTCAGSWMGCAAATNH | CAGSWMGCAAATNHCTTCCC | 2833 | 3301 |
| | CTTCCCTCCTWGGACTTTTGGCGGAGGGACCAAG | TCCTWGGACT | | |
| VK1-12_9_2_10 | CCTGAAGATTTTGCAACTTATTACTGTCAGSWMGCAAATAG | CAGSWMGCAAATAGTYWCCC | 2834 | 3302 |
| | TYWCCCTCCTWGGACTTTTGGCGGAGGGACCAAG | TCCTWGGACT | | |
| VK1-33_1_0_10 | CCTGAAGATATTGCAACATATTACTGTSWMSWMTACGATAA | SWMSWMTACGATAATCTCCC | 2835 | 3303 |
| | TCTCCCTCCTTWCACTTTTGGCGGAGGGACCAAG | TCCTTWCACT | | |
| VK1-33_10_0_10 | CCTGAAGATATTGCAACATATTACTGTCAGCAGBHCNHCAA | CAGCAGBHCNHCAATCTCCC | 2836 | 3304 |
| | TCTCCCTCCTTWCACTTTTGGCGGAGGGACCAAG | TCCTTWCACT | | |
| VK1-33_11_0_10 | CCTGAAGATATTGCAACATATTACTGTCAGCAGBHCGATNH | CAGCAGBHCGATNHCCTCCC | 2837 | 3305 |
| | CCTCCCTCCTTWCACTTTTGGCGGAGGGACCAAG | TCCTTWCACT | | |
| VK1-33_12_0_10 | CCTGAAGATATTGCAACATATTACTGTCAGCAGBHCGATAA | CAGCAGBHCGATAATYWCCC | 2838 | 3306 |
| | TYWCCCTCCTTWCACTTTTGGCGGAGGGACCAAG | TCCTTWCACT | | |
| VK1-33_13_0_10 | CCTGAAGATATTGCAACATATTACTGTCAGCAGTACNHCNH | CAGCAGTACNHCNHCCTCCC | 2839 | 3307 |
| | CCTCCCTCCTTWCACTTTTGGCGGAGGGACCAAG | TCCTTWCACT | | |
| VK1-33_14_0_10 | CCTGAAGATATTGCAACATATTACTGTCAGCAGTACNHCAA | CAGCAGTACNHCAATYWCCC | 2840 | 3308 |
| | TYWCCCTCCTTWCACTTTTGGCGGAGGGACCAAG | TCCTTWCACT | | |
| VK1-33_15_0_10 | CCTGAAGATATTGCAACATATTACTGTCAGCAGTACGATNH | CAGCAGTACGATNHCYWCCC | 2841 | 3309 |
| | CYWCCCTCCTTWCACTTTTGGCGGAGGGACCAAG | TCCTTWCACT | | |
| VK1-33_2_0_10 | CCTGAAGATATTGCAACATATTACTGTSWMCAGBHCGATAA | SWMCAGBHCGATAATCTCCC | 2842 | 3310 |
| | TCTCCCTCCTTWCACTTTTGGCGGAGGGACCAAG | TCCTTWCACT | | |
| VK1-33_3_0_10 | CCTGAAGATATTGCAACATATTACTGTSWMCAGTACNHCAA | SWMCAGTACNHCAATCTCCC | 2843 | 3311 |
| | TCTCCCTCCTTWCACTTTTGGCGGAGGGACCAAG | TCCTTWCACT | | |
| VK1-33_4_0_10 | CCTGAAGATATTGCAACATATTACTGTSWMCAGTACGATNH | SWMCAGTACGATNHCCTCCC | 2844 | 3312 |
| | CCTCCCTCCTTWCACTTTTGGCGGAGGGACCAAG | TCCTTWCACT | | |
| VK1-33_5_0_10 | CCTGAAGATATTGCAACATATTACTGTSWMCAGTACGATAA | SWMCAGTACGATAATYWCCC | 2845 | 3313 |
| | TYWCCCTCCTTWCACTTTTGGCGGAGGGACCAAG | TCCTTWCACT | | |
| VK1-33_6_0_10 | CCTGAAGATATTGCAACATATTACTGTCAGSWMBHCGATAA | CAGSWMBHCGATAATCTCCC | 2846 | 3314 |
| | TCTCCCTCCTTWCACTTTTGGCGGAGGGACCAAG | TCCTTWCACT | | |
| VK1-33_7_0_10 | CCTGAAGATATTGCAACATATTACTGTCAGSWMTACNHCAA | CAGSWMTACNHCAATCTCCC | 2847 | 3315 |
| | TCTCCCTCCTTWCACTTTTGGCGGAGGGACCAAG | TCCTTWCACT | | |
| VK1-33_8_0_10 | CCTGAAGATATTGCAACATATTACTGTCAGSWMTACGATNH | CAGSWMTACGATNHCCTCCC | 2848 | 3316 |
| | CCTCCCTCCTTWCACTTTTGGCGGAGGGACCAAG | TCCTTWCACT | | |
| VK1-33_9_0_10 | CCTGAAGATATTGCAACATATTACTGTCAGSWMTACGATAA | CAGSWMTACGATAATYWCCC | 2849 | 3317 |
| | TYWCCCTCCTTWCACTTTTGGCGGAGGGACCAAG | TCCTTWCACT | | |
| VK1-33_1_1_10 | CCTGAAGATATTGCAACATATTACTGTSWMSWMTACGATAA | SWMSWMTACGATAATCTCCC | 2850 | 3318 |
| | TCTCCCTCCTMTCACTTTTGGCGGAGGGACCAAG | TCCTMTCACT | | |
| VK1-33_10_1_10 | CCTGAAGATATTGCAACATATTACTGTCAGCAGBHCNHCAA | CAGCAGBHCNHCAATCTCCC | 2851 | 3319 |
| | TCTCCCTCCTMTCACTTTTGGCGGAGGGACCAAG | TCCTMTCACT | | |
| VK1-33_11_1_10 | CCTGAAGATATTGCAACATATTACTGTCAGCAGBHCGATNH | CAGCAGBHCGATNHCCTCCC | 2852 | 3320 |
| | CCTCCCTCCTMTCACTTTTGGCGGAGGGACCAAG | TCCTMTCACT | | |
| VK1-33_12_1_10 | CCTGAAGATATTGCAACATATTACTGTCAGCAGBHCGATAA | CAGCAGBHCGATAATYWCCC | 2853 | 3321 |
| | TYWCCCTCCTMTCACTTTTGGCGGAGGGACCAAG | TCCTMTCACT | | |
| VK1-33_13_1_10 | CCTGAAGATATTGCAACATATTACTGTCAGCAGTACNHCNH | CAGCAGTACNHCNHCCTCCC | 2854 | 3322 |
| | CCTCCCTCCTMTCACTTTTGGCGGAGGGACCAAG | TCCTMTCACT | | |
| VK1-33_14_1_10 | CCTGAAGATATTGCAACATATTACTGTCAGCAGTACNHCAA | CAGCAGTACNHCAATYWCCC | 2855 | 3323 |
| | TYWCCCTCCTMTCACTTTTGGCGGAGGGACCAAG | TCCTMTCACT | | |
| VK1-33_15_1_10 | CCTGAAGATATTGCAACATATTACTGTCAGCAGTACGATNH | CAGCAGTACGATNHCYWCCC | 2856 | 3324 |
| | CYWCCCTCCTMTCACTTTTGGCGGAGGGACCAAG | TCCTMTCACT | | |
| VK1-33_2_1_10 | CCTGAAGATATTGCAACATATTACTGTSWMCAGBHCGATAA | SWMCAGBHCGATAATCTCCC | 2857 | 3325 |
| | TCTCCCTCCTMTCACTTTTGGCGGAGGGACCAAG | TCCTMTCACT | | |
| VK1-33_3_1_10 | CCTGAAGATATTGCAACATATTACTGTSWMCAGTACNHCAA | SWMCAGTACNHCAATCTCCC | 2858 | 3326 |
| | TCTCCCTCCTMTCACTTTTGGCGGAGGGACCAAG | TCCTMTCACT | | |
| VK1-33_4_1_10 | CCTGAAGATATTGCAACATATTACTGTSWMCAGTACGATNH | SWMCAGTACGATNHCCTCCC | 2859 | 3327 |
| | CCTCCCTCCTMTCACTTTTGGCGGAGGGACCAAG | TCCTMTCACT | | |
| VK1-33_5_1_10 | CCTGAAGATATTGCAACATATTACTGTSWMCAGTACGATAA | SWMCAGTACGATAATYWCCC | 2860 | 3328 |
| | TYWCCCTCCTMTCACTTTTGGCGGAGGGACCAAG | TCCTMTCACT | | |
| VK1-33_6_1_10 | CCTGAAGATATTGCAACATATTACTGTCAGSWMBHCGATAA | CAGSWMBHCGATAATCTCCC | 2861 | 3329 |
| | TCTCCCTCCTMTCACTTTTGGCGGAGGGACCAAG | TCCTMTCACT | | |
| VK1-33_7_1_10 | CCTGAAGATATTGCAACATATTACTGTCAGSWMTACNHCAA | CAGSWMTACNHCAATCTCCC | 2862 | 3330 |
| | TCTCCCTCCTMTCACTTTTGGCGGAGGGACCAAG | TCCTMTCACT | | |
| VK1-33_8_1_10 | CCTGAAGATATTGCAACATATTACTGTCAGSWMTACGATNH | CAGSWMTACGATNHCCTCCC | 2863 | 3331 |
| | CCTCCCTCCTMTCACTTTTGGCGGAGGGACCAAG | TCCTMTCACT | | |
| VK1-33_9_1_10 | CCTGAAGATATTGCAACATATTACTGTCAGSWMTACGATAA | CAGSWMTACGATAATYWCCC | 2864 | 3332 |
| | TYWCCCTCCTMTCACTTTTGGCGGAGGGACCAAG | TCCTMTCACT | | |
| VK1-33_1_2_10 | CCTGAAGATATTGCAACATATTACTGTSWMSWMTACGATAA | SWMSWMTACGATAATCTCCC | 2865 | 3333 |
| | TCTCCCTCCTWGGACTTTTGGCGGAGGGACCAAG | TCCTWGGACT | | |
| VK1-33_10_2_10 | CCTGAAGATATTGCAACATATTACTGTCAGCAGBHCNHCAA | CAGCAGBHCNHCAATCTCCC | 2866 | 3334 |
| | TCTCCCTCCTWGGACTTTTGGCGGAGGGACCAAG | TCCTWGGACT | | |
| VK1-33_11_2_10 | CCTGAAGATATTGCAACATATTACTGTCAGCAGBHCGATNH | CAGCAGBHCGATNHCCTCCC | 2867 | 3335 |
| | CCTCCCTCCTWGGACTTTTGGCGGAGGGACCAAG | TCCTWGGACT | | |
| VK1-33_12_2_10 | CCTGAAGATATTGCAACATATTACTGTCAGCAGBHCGATAA | CAGCAGBHCGATAATYWCCC | 2868 | 3336 |
| | TYWCCCTCCTWGGACTTTTGGCGGAGGGACCAAG | TCCTWGGACT | | |
| VK1-33_13_2_10 | CCTGAAGATATTGCAACATATTACTGTCAGCAGTACNHCNH | CAGCAGTACNHCNHCCTCCC | 2869 | 3337 |
| | CCTCCCTCCTWGGACTTTTGGCGGAGGGACCAAG | TCCTWGGACT | | |
| VK1-33_14_2_10 | CCTGAAGATATTGCAACATATTACTGTCAGCAGTACNHCAA | CAGCAGTACNHCAATYWCCC | 2870 | 3338 |
| | TYWCCCTCCTWGGACTTTTGGCGGAGGGACCAAG | TCCTWGGACT | | |
| VK1-33_15_2_10 | CCTGAAGATATTGCAACATATTACTGTCAGCAGTACGATNH | CAGCAGTACGATNHCYWCCC | 2871 | 3339 |
| | CYWCCCTCCTWGGACTTTTGGCGGAGGGACCAAG | TCCTWGGACT | | |
| VK1-33_2_2_10 | CCTGAAGATATTGCAACATATTACTGTSWMCAGBHCGATAA | SWMCAGBHCGATAATCTCCC | 2872 | 3340 |
| | TCTCCCTCCTWGGACTTTTGGCGGAGGGACCAAG | TCCTWGGACT | | |
| VK1-33_3_2_10 | CCTGAAGATATTGCAACATATTACTGTSWMCAGTACNHCAA | SWMCAGTACNHCAATCTCCC | 2873 | 3341 |
| | TCTCCCTCCTWGGACTTTTGGCGGAGGGACCAAG | TCCTWGGACT | | |
| VK1-33_4_2_10 | CCTGAAGATATTGCAACATATTACTGTSWMCAGTACGATNH | SWMCAGTACGATNHCCTCCC | 2874 | 3342 |
| | CCTCCCTCCTWGGACTTTTGGCGGAGGGACCAAG | TCCTWGGACT | | |
| VK1-33_5_2_10 | CCTGAAGATATTGCAACATATTACTGTSWMCAGTACGATAA | SWMCAGTACGATAATYWCCC | 2875 | 3343 |
| | TYWCCCTCCTWGGACTTTTGGCGGAGGGACCAAG | TCCTWGGACT | | |
| VK1-33_6_2_10 | CCTGAAGATATTGCAACATATTACTGTCAGSWMBHCGATAA | CAGSWMBHCGATAATCTCCC | 2876 | 3344 |
| | TCTCCCTCCTWGGACTTTTGGCGGAGGGACCAAG | TCCTWGGACT | | |
| VK1-33_7_2_10 | CCTGAAGATATTGCAACATATTACTGTCAGSWMTACNHCAA | CAGSWMTACNHCAATCTCCC | 2877 | 3345 |
| | TCTCCCTCCTWGGACTTTTGGCGGAGGGACCAAG | TCCTWGGACT | | |
| VK1-33_8_2_10 | CCTGAAGATATTGCAACATATTACTGTCAGSWMTACGATNH | CAGSWMTACGATNHCCTCCC | 2878 | 3346 |
| | CCTCCCTCCTWGGACTTTTGGCGGAGGGACCAAG | TCCTWGGACT | | |
| VK1-33_9_2_10 | CCTGAAGATATTGCAACATATTACTGTCAGSWMTACGATAA | CAGSWMTACGATAATYWCCC | 2879 | 3347 |
| | TYWCCCTCCTWGGACTTTTGGCGGAGGGACCAAG | TCCTWGGACT | | |
| VK1-39_1_0_10 | CCTGAAGATTTTGCAACTTACTACTGTSWMSWMAGCTACAG | SWMSWMAGCTACAGTACTCC | 2880 | 3348 |
| | TACTCCTCCTTWCACTTTTGGCGGAGGGACCAAG | TCCTTWCACT | | |
| VK1-39_10_0_10 | CCTGAAGATTTTGCAACTTACTACTGTCAGCAAVNABHCAG | CAGCAAVNABHCAGTACTCC | 2881 | 3349 |
| | TACTCCTCCTTWCACTTTTGGCGGAGGGACCAAG | TCCTTWCACT | | |
| VK1-39_11_0_10 | CCTGAAGATTTTGCAACTTACTACTGTCAGCAAVNATACNH | CAGCAAVNATACNHCACTCC | 2882 | 3350 |
| | CACTCCTCCTTWCACTTTTGGCGGAGGGACCAAG | TCCTTWCACT | | |
| VK1-39_12_0_10 | CCTGAAGATTTTGCAACTTACTACTGTCAGCAAVNATACAG | CAGCAAVNATACAGTBHCCC | 2883 | 3351 |
| | TBHCCCTCCTTWCACTTTTGGCGGAGGGACCAAG | TCCTTWCACT | | |
| VK1-39_13_0_10 | CCTGAAGATTTTGCAACTTACTACTGTCAGCAAAGCBHCNH | CAGCAAAGCBHCNHCACTCC | 2884 | 3352 |
| | CACTCCTCCTTWCACTTTTGGCGGAGGGACCAAG | TCCTTWCACT | | |
| VK1-39_14_0_10 | CCTGAAGATTTTGCAACTTACTACTGTCAGCAAAGCBHCAG | CAGCAAAGCBHCAGTBHCCC | 2885 | 3353 |
| | TBHCCCTCCTTWCACTTTTGGCGGAGGGACCAAG | TCCTTWCACT | | |
| VK1-39_15_0_10 | CCTGAAGATTTTGCAACTTACTACTGTCAGCAAAGCTACNH | CAGCAAAGCTACNHCBHCCC | 2886 | 3354 |
| | CBHCCCTCCTTWCACTTTTGGCGGAGGGACCAAG | TCCTTWCACT | | |
| VK1-39_2_0_10 | CCTGAAGATTTTGCAACTTACTACTGTSWMCAAVNATACAG | SWMCAAVNATACAGTACTCC | 2887 | 3355 |
| | TACTCCTCCTTWCACTTTTGGCGGAGGGACCAAG | TCCTTWCACT | | |
| VK1-39_3_0_10 | CCTGAAGATTTTGCAACTTACTACTGTSWMCAAAGCBHCAG | SWMCAAAGCBHCAGTACTCC | 2888 | 3356 |
| | TACTCCTCCTTWCACTTTTGGCGGAGGGACCAAG | TCCTTWCACT | | |
| VK1-39_4_0_10 | CCTGAAGATTTTGCAACTTACTACTGTSWMCAAAGCTACNH | SWMCAAAGCTACNHCACTCC | 2889 | 3357 |
| | CACTCCTCCTTWCACTTTTGGCGGAGGGACCAAG | TCCTTWCACT | | |
| VK1-39_5_0_10 | CCTGAAGATTTTGCAACTTACTACTGTSWMCAAAGCTACAG | SWMCAAAGCTACAGTBHCCC | 2890 | 3358 |
| | TBHCCCTCCTTWCACTTTTGGCGGAGGGACCAAG | TCCTTWCACT | | |
| VK1-39_6_0_10 | CCTGAAGATTTTGCAACTTACTACTGTCAGSWMVNATACAG | CAGSWMVNATACAGTACTCC | 2891 | 3359 |
| | TACTCCTCCTTWCACTTTTGGCGGAGGGACCAAG | TCCTTWCACT | | |
| VK1-39_7_0_10 | CCTGAAGATTTTGCAACTTACTACTGTCAGSWMAGCBHCAG | CAGSWMAGCBHCAGTACTCC | 2892 | 3360 |
| | TACTCCTCCTTWCACTTTTGGCGGAGGGACCAAG | TCCTTWCACT | | |
| VK1-39_8_0_10 | CCTGAAGATTTTGCAACTTACTACTGTCAGSWMAGCTACNH | CAGSWMAGCTACNHCACTCC | 2893 | 3361 |
| | CACTCCTCCTTWCACTTTTGGCGGAGGGACCAAG | TCCTTWCACT | | |
| VK1-39_9_0_10 | CCTGAAGATTTTGCAACTTACTACTGTCAGSWMAGCTACAG | CAGSWMAGCTACAGTBHCCC | 2894 | 3362 |
| | TBHCCCTCCTTWCACTTTTGGCGGAGGGACCAAG | TCCTTWCACT | | |
| VK1-39_1_1_10 | CCTGAAGATTTTGCAACTTACTACTGTSWMSWMAGCTACAG | SWMSWMAGCTACAGTACTCC | 2895 | 3363 |
| | TACTCCTCCTMTCACTTTTGGCGGAGGGACCAAG | TCCTMTCACT | | |
| VK1-39_10_1_10 | CCTGAAGATTTTGCAACTTACTACTGTCAGCAAVNABHCAG | CAGCAAVNABHCAGTACTCC | 2896 | 3364 |
| | TACTCCTCCTMTCACTTTTGGCGGAGGGACCAAG | TCCTMTCACT | | |
| VK1-39_11_1_10 | CCTGAAGATTTTGCAACTTACTACTGTCAGCAAVNATACNH | CAGCAAVNATACNHCACTCC | 2897 | 3365 |
| | CACTCCTCCTMTCACTTTTGGCGGAGGGACCAAG | TCCTMTCACT | | |
| VK1-39_12_1_10 | CCTGAAGATTTTGCAACTTACTACTGTCAGCAAVNATACAG | CAGCAAVNATACAGTBHCCC | 2898 | 3366 |
| | TBHCCCTCCTMTCACTTTTGGCGGAGGGACCAAG | TCCTMTCACT | | |
| VK1-39_13_1_10 | CCTGAAGATTTTGCAACTTACTACTGTCAGCAAAGCBHCNH | CAGCAAAGCBHCNHCACTCC | 2899 | 3367 |
| | CACTCCTCCTMTCACTTTTGGCGGAGGGACCAAG | TCCTMTCACT | | |
| VK1-39_14_1_10 | CCTGAAGATTTTGCAACTTACTACTGTCAGCAAAGCBHCAG | CAGCAAAGCBHCAGTBHCCC | 2900 | 3368 |
| | TBHCCCTCCTMTCACTTTTGGCGGAGGGACCAAG | TCCTMTCACT | | |
| VK1-39_15_1_10 | CCTGAAGATTTTGCAACTTACTACTGTCAGCAAAGCTACNH | CAGCAAAGCTACNHCBHCCC | 2901 | 3369 |
| | CBHCCCTCCTMTCACTTTTGGCGGAGGGACCAAG | TCCTMTCACT | | |
| VK1-39_2_1_10 | CCTGAAGATTTTGCAACTTACTACTGTSWMCAAVNATACAG | SWMCAAVNATACAGTACTCC | 2902 | 3370 |
| | TACTCCTCCTMTCACTTTTGGCGGAGGGACCAAG | TCCTMTCACT | | |
| VK1-39_3_1_10 | CCTGAAGATTTTGCAACTTACTACTGTSWMCAAAGCBHCAG | SWMCAAAGCBHCAGTACTCC | 2903 | 3371 |
| | TACTCCTCCTMTCACTTTTGGCGGAGGGACCAAG | TCCTMTCACT | | |
| VK1-39_4_1_10 | CCTGAAGATTTTGCAACTTACTACTGTSWMCAAAGCTACNH | SWMCAAAGCTACNHCACTCC | 2904 | 3372 |
| | CACTCCTCCTMTCACTTTTGGCGGAGGGACCAAG | TCCTMTCACT | | |
| VK1-39_5_1_10 | CCTGAAGATTTTGCAACTTACTACTGTSWMCAAAGCTACAG | SWMCAAAGCTACAGTBHCCC | 2905 | 3373 |
| | TBHCCCTCCTMTCACTTTTGGCGGAGGGACCAAG | TCCTMTCACT | | |
| VK1-39_6_1_10 | CCTGAAGATTTTGCAACTTACTACTGTCAGSWMVNATACAG | CAGSWMVNATACAGTACTCC | 2906 | 3374 |
| | TACTCCTCCTMTCACTTTTGGCGGAGGGACCAAG | TCCTMTCACT | | |
| VK1-39_7_1_10 | CCTGAAGATTTTGCAACTTACTACTGTCAGSWMAGCBHCAG | CAGSWMAGCBHCAGTACTCC | 2907 | 3375 |
| | TACTCCTCCTMTCACTTTTGGCGGAGGGACCAAG | TCCTMTCACT | | |
| VK1-39_8_1_10 | CCTGAAGATTTTGCAACTTACTACTGTCAGSWMAGCTACNH | CAGSWMAGCTACNHCACTCC | 2908 | 3376 |
| | CACTCCTCCTMTCACTTTTGGCGGAGGGACCAAG | TCCTMTCACT | | |
| VK1-39_9_1_10 | CCTGAAGATTTTGCAACTTACTACTGTCAGSWMAGCTACAG | CAGSWMAGCTACAGTBHCCC | 2909 | 3377 |
| | TBHCCCTCCTMTCACTTTTGGCGGAGGGACCAAG | TCCTMTCACT | | |
| VK1-39_1_2_10 | CCTGAAGATTTTGCAACTTACTACTGTSWMSWMAGCTACAG | SWMSWMAGCTACAGTACTCC | 2910 | 3378 |
| | TACTCCTCCTWGGACTTTTGGCGGAGGGACCAAG | TCCTWGGACT | | |
| VK1-39_10_2_10 | CCTGAAGATTTTGCAACTTACTACTGTCAGCAAVNABHCAG | CAGCAAVNABHCAGTACTCC | 2911 | 3379 |
| | TACTCCTCCTWGGACTTTTGGCGGAGGGACCAAG | TCCTWGGACT | | |
| VK1-39_11_2_10 | CCTGAAGATTTTGCAACTTACTACTGTCAGCAAVNATACNH | CAGCAAVNATACNHCACTCC | 2912 | 3380 |
| | CACTCCTCCTWGGACTTTTGGCGGAGGGACCAAG | TCCTWGGACT | | |
| VK1-39_12_2_10 | CCTGAAGATTTTGCAACTTACTACTGTCAGCAAVNATACAG | CAGCAAVNATACAGTBHCCC | 2913 | 3381 |
| | TBHCCCTCCTWGGACTTTTGGCGGAGGGACCAAG | TCCTWGGACT | | |
| VK1-39_13_2_10 | CCTGAAGATTTTGCAACTTACTACTGTCAGCAAAGCBHCNH | CAGCAAAGCBHCNHCACTCC | 2914 | 3382 |
| | CACTCCTCCTWGGACTTTTGGCGGAGGGACCAAG | TCCTWGGACT | | |
| VK1-39_14_2_10 | CCTGAAGATTTTGCAACTTACTACTGTCAGCAAAGCBHCAG | CAGCAAAGCBHCAGTBHCCC | 2915 | 3383 |
| | TBHCCCTCCTWGGACTTTTGGCGGAGGGACCAAG | TCCTWGGACT | | |
| VK1-39_15_2_10 | CCTGAAGATTTTGCAACTTACTACTGTCAGCAAAGCTACNH | CAGCAAAGCTACNHCBHCCC | 2916 | 3384 |
| | CBHCCCTCCTWGGACTTTTGGCGGAGGGACCAAG | TCCTWGGACT | | |
| VK1-39_2_2_10 | CCTGAAGATTTTGCAACTTACTACTGTSWMCAAVNATACAG | SWMCAAVNATACAGTACTCC | 2917 | 3385 |
| | TACTCCTCCTWGGACTTTTGGCGGAGGGACCAAG | TCCTWGGACT | | |
| VK1-39_3_2_10 | CCTGAAGATTTTGCAACTTACTACTGTSWMCAAAGCBHCAG | SWMCAAAGCBHCAGTACTCC | 2918 | 3386 |
| | TACTCCTCCTWGGACTTTTGGCGGAGGGACCAAG | TCCTWGGACT | | |
| VK1-39_4_2_10 | CCTGAAGATTTTGCAACTTACTACTGTSWMCAAAGCTACNH | SWMCAAAGCTACNHCACTCC | 2919 | 3387 |
| | CACTCCTCCTWGGACTTTTGGCGGAGGGACCAAG | TCCTWGGACT | | |
| VK1-39_5_2_10 | CCTGAAGATTTTGCAACTTACTACTGTSWMCAAAGCTACAG | SWMCAAAGCTACAGTBHCCC | 2920 | 3388 |
| | TBHCCCTCCTWGGACTTTTGGCGGAGGGACCAAG | TCCTWGGACT | | |
| VK1-39_6_2_10 | CCTGAAGATTTTGCAACTTACTACTGTCAGSWMVNATACAG | CAGSWMVNATACAGTACTCC | 2921 | 3389 |
| | TACTCCTCCTWGGACTTTTGGCGGAGGGACCAAG | TCCTWGGACT | | |
| VK1-39_7_2_10 | CCTGAAGATTTTGCAACTTACTACTGTCAGSWMAGCBHCAG | CAGSWMAGCBHCAGTACTCC | 2922 | 3390 |
| | TACTCCTCCTWGGACTTTTGGCGGAGGGACCAAG | TCCTWGGACT | | |
| VK1-39_8_2_10 | CCTGAAGATTTTGCAACTTACTACTGTCAGSWMAGCTACNH | CAGSWMAGCTACNHCACTCC | 2923 | 3391 |
| | CACTCCTCCTWGGACTTTTGGCGGAGGGACCAAG | TCCTWGGACT | | |
| VK1-39_9_2_10 | CCTGAAGATTTTGCAACTTACTACTGTCAGSWMAGCTACAG | CAGSWMAGCTACAGTBHCCC | 2924 | 3392 |
| | TBHCCCTCCTWGGACTTTTGGCGGAGGGACCAAG | TCCTWGGACT | | |
| VK2-28_1_0_10 | GCTGAGGATGTTGGGGTTTATTACTGCDTSSWMGCACTCCA | DTSSWMGCACTCCAGACTCC | 2925 | 3393 |
| | GACTCCTCCTTWCACTTTTGGCGGAGGGACCAAG | TCCTTWCACT | | |
| VK2-28_10_0_10 | GCTGAGGATGTTGGGGTTTATTACTGCATGCAGVNAMNACA | ATGCAGVNAMNACAGACTCC | 2926 | 3394 |
| | GACTCCTCCTTWCACTTTTGGCGGAGGGACCAAG | TCCTTWCACT | | |
| VK2-28_11_0_10 | GCTGAGGATGTTGGGGTTTATTACTGCATGCAGVNACTCSR | ATGCAGVNACTCSRMACTCC | 2927 | 3395 |
| | MACTCCTCCTTWCACTTTTGGCGGAGGGACCAAG | TCCTTWCACT | | |
| VK2-28_12_0_10 | GCTGAGGATGTTGGGGTTTATTACTGCATGCAGVNACTCCA | ATGCAGVNACTCCAGVBCCC | 2928 | 3396 |
| | GVBCCCTCCTTWCACTTTTGGCGGAGGGACCAAG | TCCTTWCACT | | |
| VK2-28_13_0_10 | GCTGAGGATGTTGGGGTTTATTACTGCATGCAGGCAMNASR | ATGCAGGCAMNASRMACTCC | 2929 | 3397 |
| | MACTCCTCCTTWCACTTTTGGCGGAGGGACCAAG | TCCTTWCACT | | |
| VK2-28_14_0_10 | GCTGAGGATGTTGGGGTTTATTACTGCATGCAGGCAMNACA | ATGCAGGCAMNACAGVBCCC | 2930 | 3398 |
| | GVBCCCTCCTTWCACTTTTGGCGGAGGGACCAAG | TCCTTWCACT | | |
| VK2-28_15_0_10 | GCTGAGGATGTTGGGGTTTATTACTGCATGCAGGCACTCSR | ATGCAGGCACTCSRMVBCCC | 2931 | 3399 |
| | MVBCCCTCCTTWCACTTTTGGCGGAGGGACCAAG | TCCTTWCACT | | |
| VK2-28_2_0_10 | GCTGAGGATGTTGGGGTTTATTACTGCDTSCAGVNACTCCA | DTSCAGVNACTCCAGACTCC | 2932 | 3400 |
| | GACTCCTCCTTWCACTTTTGGCGGAGGGACCAAG | TCCTTWCACT | | |
| VK2-28_3_0_10 | GCTGAGGATGTTGGGGTTTATTACTGCDTSCAGGCAMNACA | DTSCAGGCAMNACAGACTCC | 2933 | 3401 |
| | GACTCCTCCTTWCACTTTTGGCGGAGGGACCAAG | TCCTTWCACT | | |
| VK2-28_4_0_10 | GCTGAGGATGTTGGGGTTTATTACTGCDTSCAGGCACTCSR | DTSCAGGCACTCSRMACTCC | 2934 | 3402 |
| | MACTCCTCCTTWCACTTTTGGCGGAGGGACCAAG | TCCTTWCACT | | |
| VK2-28_5_0_10 | GCTGAGGATGTTGGGGTTTATTACTGCDTSCAGGCACTCCA | DTSCAGGCACTCCAGVBCCC | 2935 | 3403 |
| | GVBCCCTCCTTWCACTTTTGGCGGAGGGACCAAG | TCCTTWCACT | | |
| VK2-28_6_0_10 | GCTGAGGATGTTGGGGTTTATTACTGCATGSWMVNACTCCA | ATGSWMVNACTCCAGACTCC | 2936 | 3404 |
| | GACTCCTCCTTWCACTTTTGGCGGAGGGACCAAG | TCCTTWCACT | | |
| VK2-28_7_0_10 | GCTGAGGATGTTGGGGTTTATTACTGCATGSWMGCAMNACA | ATGSWMGCAMNACAGACTCC | 2937 | 3405 |
| | GACTCCTCCTTWCACTTTTGGCGGAGGGACCAAG | TCCTTWCACT | | |
| VK2-28_8_0_10 | GCTGAGGATGTTGGGGTTTATTACTGCATGSWMGCACTCSR | ATGSWMGCACTCSRMACTCC | 2938 | 3406 |
| | MACTCCTCCTTWCACTTTTGGCGGAGGGACCAAG | TCCTTWCACT | | |
| VK2-28_9_0_10 | GCTGAGGATGTTGGGGTTTATTACTGCATGSWMGCACTCCA | ATGSWMGCACTCCAGVBCCC | 2939 | 3407 |
| | GVBCCCTCCTTWCACTTTTGGCGGAGGGACCAAG | TCCTTWCACT | | |
| VK2-28_1_1_10 | GCTGAGGATGTTGGGGTTTATTACTGCDTSSWMGCACTCCA | DTSSWMGCACTCCAGACTCC | 2940 | 3408 |
| | GACTCCTCCTMTCACTTTTGGCGGAGGGACCAAG | TCCTMTCACT | | |
| VK2-28_10_1_10 | GCTGAGGATGTTGGGGTTTATTACTGCATGCAGVNAMNACA | ATGCAGVNAMNACAGACTCC | 2941 | 3409 |
| | GACTCCTCCTMTCACTTTTGGCGGAGGGACCAAG | TCCTMTCACT | | |
| VK2-28_11_1_10 | GCTGAGGATGTTGGGGTTTATTACTGCATGCAGVNACTCSR | ATGCAGVNACTCSRMACTCC | 2942 | 3410 |
| | MACTCCTCCTMTCACTTTTGGCGGAGGGACCAAG | TCCTMTCACT | | |
| VK2-28_12_1_10 | GCTGAGGATGTTGGGGTTTATTACTGCATGCAGVNACTCCA | ATGCAGVNACTCCAGVBCCC | 2943 | 3411 |
| | GVBCCCTCCTMTCACTTTTGGCGGAGGGACCAAG | TCCTMTCACT | | |
| VK2-28_13_1_10 | GCTGAGGATGTTGGGGTTTATTACTGCATGCAGGCAMNASR | ATGCAGGCAMNASRMACTCC | 2944 | 3412 |
| | MACTCCTCCTMTCACTTTTGGCGGAGGGACCAAG | TCCTMTCACT | | |
| VK2-28_14_1_10 | GCTGAGGATGTTGGGGTTTATTACTGCATGCAGGCAMNACA | ATGCAGGCAMNACAGVBCCC | 2945 | 3413 |
| | GVBCCCTCCTMTCACTTTTGGCGGAGGGACCAAG | TCCTMTCACT | | |
| VK2-28_15_1_10 | GCTGAGGATGTTGGGGTTTATTACTGCATGCAGGCACTCSR | ATGCAGGCACTCSRMVBCCC | 2946 | 3414 |
| | MVBCCCTCCTMTCACTTTTGGCGGAGGGACCAAG | TCCTMTCACT | | |
| VK2-28_2_1_10 | GCTGAGGATGTTGGGGTTTATTACTGCDTSCAGVNACTCCA | DTSCAGVNACTCCAGACTCC | 2947 | 3415 |
| | GACTCCTCCTMTCACTTTTGGCGGAGGGACCAAG | TCCTMTCACT | | |
| VK2-28_3_1_10 | GCTGAGGATGTTGGGGTTTATTACTGCDTSCAGGCAMNACA | DTSCAGGCAMNACAGACTCC | 2948 | 3416 |
| | GACTCCTCCTMTCACTTTTGGCGGAGGGACCAAG | TCCTMTCACT | | |
| VK2-28_4_1_10 | GCTGAGGATGTTGGGGTTTATTACTGCDTSCAGGCACTCSR | DTSCAGGCACTCSRMACTCC | 2949 | 3417 |
| | MACTCCTCCTMTCACTTTTGGCGGAGGGACCAAG | TCCTMTCACT | | |
| VK2-28_5_1_10 | GCTGAGGATGTTGGGGTTTATTACTGCDTSCAGGCACTCCA | DTSCAGGCACTCCAGVBCCC | 2950 | 3418 |
| | GVBCCCTCCTMTCACTTTTGGCGGAGGGACCAAG | TCCTMTCACT | | |
| VK2-28_6_1_10 | GCTGAGGATGTTGGGGTTTATTACTGCATGSWMVNACTCCA | ATGSWMVNACTCCAGACTCC | 2951 | 3419 |
| | GACTCCTCCTMTCACTTTTGGCGGAGGGACCAAG | TCCTMTCACT | | |
| VK2-28_7_1_10 | GCTGAGGATGTTGGGGTTTATTACTGCATGSWMGCAMNACA | ATGSWMGCAMNACAGACTCC | 2952 | 3420 |
| | GACTCCTCCTMTCACTTTTGGCGGAGGGACCAAG | TCCTMTCACT | | |
| VK2-28_8_1_10 | GCTGAGGATGTTGGGGTTTATTACTGCATGSWMGCACTCSR | ATGSWMGCACTCSRMACTCC | 2953 | 3421 |
| | MACTCCTCCTMTCACTTTTGGCGGAGGGACCAAG | TCCTMTCACT | | |
| VK2-28_9_1_10 | GCTGAGGATGTTGGGGTTTATTACTGCATGSWMGCACTCCA | ATGSWMGCACTCCAGVBCCC | 2954 | 3422 |
| | GVBCCCTCCTMTCACTTTTGGCGGAGGGACCAAG | TCCTMTCACT | | |
| VK2-28_1_2_10 | GCTGAGGATGTTGGGGTTTATTACTGCDTSSWMGCACTCCA | DTSSWMGCACTCCAGACTCC | 2955 | 3423 |
| | GACTCCTCCTWGGACTTTTGGCGGAGGGACCAAG | TCCTWGGACT | | |
| VK2-28_10_2_10 | GCTGAGGATGTTGGGGTTTATTACTGCATGCAGVNAMNACA | ATGCAGVNAMNACAGACTCC | 2956 | 3424 |
| | GACTCCTCCTWGGACTTTTGGCGGAGGGACCAAG | TCCTWGGACT | | |
| VK2-28_11_2_10 | GCTGAGGATGTTGGGGTTTATTACTGCATGCAGVNACTCSR | ATGCAGVNACTCSRMACTCC | 2957 | 3425 |
| | MACTCCTCCTWGGACTTTTGGCGGAGGGACCAAG | TCCTWGGACT | | |
| VK2-28_12_2_10 | GCTGAGGATGTTGGGGTTTATTACTGCATGCAGVNACTCCA | ATGCAGVNACTCCAGVBCCC | 2958 | 3426 |
| | GVBCCCTCCTWGGACTTTTGGCGGAGGGACCAAG | TCCTWGGACT | | |
| VK2-28_13_2_10 | GCTGAGGATGTTGGGGTTTATTACTGCATGCAGGCAMNASR | ATGCAGGCAMNASRMACTCC | 2959 | 3427 |
| | MACTCCTCCTWGGACTTTTGGCGGAGGGACCAAG | TCCTWGGACT | | |
| VK2-28_14_2_10 | GCTGAGGATGTTGGGGTTTATTACTGCATGCAGGCAMNACA | ATGCAGGCAMNACAGVBCCC | 2960 | 3428 |
| | GVBCCCTCCTWGGACTTTTGGCGGAGGGACCAAG | TCCTWGGACT | | |
| VK2-28_15_2_10 | GCTGAGGATGTTGGGGTTTATTACTGCATGCAGGCACTCSR | ATGCAGGCACTCSRMVBCCC | 2961 | 3429 |
| | MVBCCCTCCTWGGACTTTTGGCGGAGGGACCAAG | TCCTWGGACT | | |
| VK2-28_2_2_10 | GCTGAGGATGTTGGGGTTTATTACTGCDTSCAGVNACTCCA | DTSCAGVNACTCCAGACTCC | 2962 | 3430 |
| | GACTCCTCCTWGGACTTTTGGCGGAGGGACCAAG | TCCTWGGACT | | |
| VK2-28_3_2_10 | GCTGAGGATGTTGGGGTTTATTACTGCDTSCAGGCAMNACA | DTSCAGGCAMNACAGACTCC | 2963 | 3431 |
| | GACTCCTCCTWGGACTTTTGGCGGAGGGACCAAG | TCCTWGGACT | | |
| VK2-28_4_2_10 | GCTGAGGATGTTGGGGTTTATTACTGCDTSCAGGCACTCSR | DTSCAGGCACTCSRMACTCC | 2964 | 3432 |
| | MACTCCTCCTWGGACTTTTGGCGGAGGGACCAAG | TCCTWGGACT | | |
| VK2-28_5_2_10 | GCTGAGGATGTTGGGGTTTATTACTGCDTSCAGGCACTCCA | DTSCAGGCACTCCAGVBCCC | 2965 | 3433 |
| | GVBCCCTCCTWGGACTTTTGGCGGAGGGACCAAG | TCCTWGGACT | | |
| VK2-28_6_2_10 | GCTGAGGATGTTGGGGTTTATTACTGCATGSWMVNACTCCA | ATGSWMVNACTCCAGACTCC | 2966 | 3434 |
| | GACTCCTCCTWGGACTTTTGGCGGAGGGACCAAG | TCCTWGGACT | | |
| VK2-28_7_2_10 | GCTGAGGATGTTGGGGTTTATTACTGCATGSWMGCAMNACA | ATGSWMGCAMNACAGACTCC | 2967 | 3435 |
| | GACTCCTCCTWGGACTTTTGGCGGAGGGACCAAG | TCCTWGGACT | | |
| VK2-28_8_2_10 | GCTGAGGATGTTGGGGTTTATTACTGCATGSWMGCACTCSR | ATGSWMGCACTCSRMACTCC | 2968 | 3436 |
| | MACTCCTCCTWGGACTTTTGGCGGAGGGACCAAG | TCCTWGGACT | | |
| VK2-28_9_2_10 | GCTGAGGATGTTGGGGTTTATTACTGCATGSWMGCACTCCA | ATGSWMGCACTCCAGVBCCC | 2969 | 3437 |
| | GVBCCCTCCTWGGACTTTTGGCGGAGGGACCAAG | TCCTWGGACT | | |
| VK3-11_1_0_10 | CCTGAAGATTTTGCAGTTTATTACTGTSWMSWMAGAAGTAA | SWMSWMAGAAGTAATTGGCC | 2970 | 3438 |
| | TTGGCCTCCTTWCACTTTTGGCGGAGGGACCAAG | TCCTTWCACT | | |
| VK3-11_10_0_10 | CCTGAAGATTTTGCAGTTTATTACTGTCAGCAGBHCNHCAA | CAGCAGBHCNHCAATTGGCC | 2971 | 3439 |
| | TTGGCCTCCTTWCACTTTTGGCGGAGGGACCAAG | TCCTTWCACT | | |
| VK3-11_11_0_10 | CCTGAAGATTTTGCAGTTTATTACTGTCAGCAGBHCAGTNH | CAGCAGBHCAGTNHCTGGCC | 2972 | 3440 |
| | CTGGCCTCCTTWCACTTTTGGCGGAGGGACCAAG | TCCTTWCACT | | |
| VK3-11_12_0_10 | CCTGAAGATTTTGCAGTTTATTACTGTCAGCAGBHCAGTAA | CAGCAGBHCAGTAATYWCCC | 2973 | 3441 |
| | TYWCCCTCCTTWCACTTTTGGCGGAGGGACCAAG | TCCTTWCACT | | |
| VK3-11_13_0_10 | CCTGAAGATTTTGCAGTTTATTACTGTCAGCAGAGANHCNH | CAGCAGAGANHCNHCTGGCC | 2974 | 3442 |
| | CTGGCCTCCTTWCACTTTTGGCGGAGGGACCAAG | TCCTTWCACT | | |
| VK3-11_14_0_10 | CCTGAAGATTTTGCAGTTTATTACTGTCAGCAGAGANHCAA | CAGCAGAGANHCAATYWCCC | 2975 | 3443 |
| | TYWCCCTCCTTWCACTTTTGGCGGAGGGACCAAG | TCCTTWCACT | | |
| VK3-11_15_0_10 | CCTGAAGATTTTGCAGTTTATTACTGTCAGCAGAGAAGTNH | CAGCAGAGAAGTNHCYWCCC | 2976 | 3444 |
| | CYWCCCTCCTTWCACTTTTGGCGGAGGGACCAAG | TCCTTWCACT | | |
| VK3-11_2_0_10 | CCTGAAGATTTTGCAGTTTATTACTGTSWMCAGBHCAGTAA | SWMCAGBHCAGTAATTGGCC | 2977 | 3445 |
| | TTGGCCTCCTTWCACTTTTGGCGGAGGGACCAAG | TCCTTWCACT | | |
| VK3-11_3_0_10 | CCTGAAGATTTTGCAGTTTATTACTGTSWMCAGAGANHCAA | SWMCAGAGANHCAATTGGCC | 2978 | 3446 |
| | TTGGCCTCCTTWCACTTTTGGCGGAGGGACCAAG | TCCTTWCACT | | |
| VK3-11_4_0_10 | CCTGAAGATTTTGCAGTTTATTACTGTSWMCAGAGAAGTNH | SWMCAGAGAAGTNHCTGGCC | 2979 | 3447 |
| | CTGGCCTCCTTWCACTTTTGGCGGAGGGACCAAG | TCCTTWCACT | | |
| VK3-11_5_0_10 | CCTGAAGATTTTGCAGTTTATTACTGTSWMCAGAGAAGTAA | SWMCAGAGAAGTAATYWCCC | 2980 | 3448 |
| | TYWCCCTCCTTWCACTTTTGGCGGAGGGACCAAG | TCCTTWCACT | | |
| VK3-11_6_0_10 | CCTGAAGATTTTGCAGTTTATTACTGTCAGSWMBHCAGTAA | CAGSWMBHCAGTAATTGGCC | 2981 | 3449 |
| | TTGGCCTCCTTWCACTTTTGGCGGAGGGACCAAG | TCCTTWCACT | | |
| VK3-11_7_0_10 | CCTGAAGATTTTGCAGTTTATTACTGTCAGSWMAGANHCAA | CAGSWMAGANHCAATTGGCC | 2982 | 3450 |
| | TTGGCCTCCTTWCACTTTTGGCGGAGGGACCAAG | TCCTTWCACT | | |
| VK3-11_8_0_10 | CCTGAAGATTTTGCAGTTTATTACTGTCAGSWMAGAAGTNH | CAGSWMAGAAGTNHCTGGCC | 2983 | 3451 |
| | CTGGCCTCCTTWCACTTTTGGCGGAGGGACCAAG | TCCTTWCACT | | |
| VK3-11_9_0_10 | CCTGAAGATTTTGCAGTTTATTACTGTCAGSWMAGAAGTAA | CAGSWMAGAAGTAATYWCCC | 2984 | 3452 |
| | TYWCCCTCCTTWCACTTTTGGCGGAGGGACCAAG | TCCTTWCACT | | |
| VK3-11_1_1_10 | CCTGAAGATTTTGCAGTTTATTACTGTSWMSWMAGAAGTAA | SWMSWMAGAAGTAATTGGCC | 2985 | 3453 |
| | TTGGCCTCCTMTCACTTTTGGCGGAGGGACCAAG | TCCTMTCACT | | |
| VK3-11_10_1_10 | CCTGAAGATTTTGCAGTTTATTACTGTCAGCAGBHCNHCAA | CAGCAGBHCNHCAATTGGCC | 2986 | 3454 |
| | TTGGCCTCCTMTCACTTTTGGCGGAGGGACCAAG | TCCTMTCACT | | |
| VK3-11_11_1_10 | CCTGAAGATTTTGCAGTTTATTACTGTCAGCAGBHCAGTNH | CAGCAGBHCAGTNHCTGGCC | 2987 | 3455 |
| | CTGGCCTCCTMTCACTTTTGGCGGAGGGACCAAG | TCCTMTCACT | | |
| VK3-11_12_1_10 | CCTGAAGATTTTGCAGTTTATTACTGTCAGCAGBHCAGTAA | CAGCAGBHCAGTAATYWCCC | 2988 | 3456 |
| | TYWCCCTCCTMTCACTTTTGGCGGAGGGACCAAG | TCCTMTCACT | | |
| VK3-11_13_1_10 | CCTGAAGATTTTGCAGTTTATTACTGTCAGCAGAGANHCNH | CAGCAGAGANHCNHCTGGCC | 2989 | 3457 |
| | CTGGCCTCCTMTCACTTTTGGCGGAGGGACCAAG | TCCTMTCACT | | |
| VK3-11_14_1_10 | CCTGAAGATTTTGCAGTTTATTACTGTCAGCAGAGANHCAA | CAGCAGAGANHCAATYWCCC | 2990 | 3458 |
| | TYWCCCTCCTMTCACTTTTGGCGGAGGGACCAAG | TCCTMTCACT | | |
| VK3-11_15_1_10 | CCTGAAGATTTTGCAGTTTATTACTGTCAGCAGAGAAGTNH | CAGCAGAGAAGTNHCYWCCC | 2991 | 3459 |
| | CYWCCCTCCTMTCACTTTTGGCGGAGGGACCAAG | TCCTMTCACT | | |
| VK3-11_2_1_10 | CCTGAAGATTTTGCAGTTTATTACTGTSWMCAGBHCAGTAA | SWMCAGBHCAGTAATTGGCC | 2992 | 3460 |
| | TTGGCCTCCTMTCACTTTTGGCGGAGGGACCAAG | TCCTMTCACT | | |
| VK3-11_3_1_10 | CCTGAAGATTTTGCAGTTTATTACTGTSWMCAGAGANHCAA | SWMCAGAGANHCAATTGGCC | 2993 | 3461 |
| | TTGGCCTCCTMTCACTTTTGGCGGAGGGACCAAG | TCCTMTCACT | | |
| VK3-11_4_1_10 | CCTGAAGATTTTGCAGTTTATTACTGTSWMCAGAGAAGTNH | SWMCAGAGAAGTNHCTGGCC | 2994 | 3462 |
| | CTGGCCTCCTMTCACTTTTGGCGGAGGGACCAAG | TCCTMTCACT | | |
| VK3-11_5_1_10 | CCTGAAGATTTTGCAGTTTATTACTGTSWMCAGAGAAGTAA | SWMCAGAGAAGTAATYWCCC | 2995 | 3463 |
| | TYWCCCTCCTMTCACTTTTGGCGGAGGGACCAAG | TCCTMTCACT | | |
| VK3-11_6_1_10 | CCTGAAGATTTTGCAGTTTATTACTGTCAGSWMBHCAGTAA | CAGSWMBHCAGTAATTGGCC | 2996 | 3464 |
| | TTGGCCTCCTMTCACTTTTGGCGGAGGGACCAAG | TCCTMTCACT | | |
| VK3-11_7_1_10 | CCTGAAGATTTTGCAGTTTATTACTGTCAGSWMAGANHCAA | CAGSWMAGANHCAATTGGCC | 2997 | 3465 |
| | TTGGCCTCCTMTCACTTTTGGCGGAGGGACCAAG | TCCTMTCACT | | |
| VK3-11_8_1_10 | CCTGAAGATTTTGCAGTTTATTACTGTCAGSWMAGAAGTNH | CAGSWMAGAAGTNHCTGGCC | 2998 | 3466 |
| | CTGGCCTCCTMTCACTTTTGGCGGAGGGACCAAG | TCCTMTCACT | | |
| VK3-11_9_1_10 | CCTGAAGATTTTGCAGTTTATTACTGTCAGSWMAGAAGTAA | CAGSWMAGAAGTAATYWCCC | 2999 | 3467 |
| | TYWCCCTCCTMTCACTTTTGGCGGAGGGACCAAG | TCCTMTCACT | | |
| VK3-11_1_2_10 | CCTGAAGATTTTGCAGTTTATTACTGTSWMSWMAGAAGTAA | SWMSWMAGAAGTAATTGGCC | 3000 | 3468 |
| | TTGGCCTCCTWGGACTTTTGGCGGAGGGACCAAG | TCCTWGGACT | | |
| VK3-11_10_2_10 | CCTGAAGATTTTGCAGTTTATTACTGTCAGCAGBHCNHCAA | CAGCAGBHCNHCAATTGGCC | 3001 | 3469 |
| | TTGGCCTCCTWGGACTTTTGGCGGAGGGACCAAG | TCCTWGGACT | | |
| VK3-11_11_2_10 | CCTGAAGATTTTGCAGTTTATTACTGTCAGCAGBHCAGTNH | CAGCAGBHCAGTNHCTGGCC | 3002 | 3470 |
| | CTGGCCTCCTWGGACTTTTGGCGGAGGGACCAAG | TCCTWGGACT | | |
| VK3-11_12_2_10 | CCTGAAGATTTTGCAGTTTATTACTGTCAGCAGBHCAGTAA | CAGCAGBHCAGTAATYWCCC | 3003 | 3471 |
| | TYWCCCTCCTWGGACTTTTGGCGGAGGGACCAAG | TCCTWGGACT | | |
| VK3-11_13_2_10 | CCTGAAGATTTTGCAGTTTATTACTGTCAGCAGAGANHCNH | CAGCAGAGANHCNHCTGGCC | 3004 | 3472 |
| | CTGGCCTCCTWGGACTTTTGGCGGAGGGACCAAG | TCCTWGGACT | | |
| VK3-11_14_2_10 | CCTGAAGATTTTGCAGTTTATTACTGTCAGCAGAGANHCAA | CAGCAGAGANHCAATYWCCC | 3005 | 3473 |
| | TYWCCCTCCTWGGACTTTTGGCGGAGGGACCAAG | TCCTWGGACT | | |
| VK3-11_15_2_10 | CCTGAAGATTTTGCAGTTTATTACTGTCAGCAGAGAAGTNH | CAGCAGAGAAGTNHCYWCCC | 3006 | 3474 |
| | CYWCCCTCCTWGGACTTTTGGCGGAGGGACCAAG | TCCTWGGACT | | |
| VK3-11_2_2_10 | CCTGAAGATTTTGCAGTTTATTACTGTSWMCAGBHCAGTAA | SWMCAGBHCAGTAATTGGCC | 3007 | 3475 |
| | TTGGCCTCCTWGGACTTTTGGCGGAGGGACCAAG | TCCTWGGACT | | |
| VK3-11_3_2_10 | CCTGAAGATTTTGCAGTTTATTACTGTSWMCAGAGANHCAA | SWMCAGAGANHCAATTGGCC | 3008 | 3476 |
| | TTGGCCTCCTWGGACTTTTGGCGGAGGGACCAAG | TCCTWGGACT | | |
| VK3-11_4_2_10 | CCTGAAGATTTTGCAGTTTATTACTGTSWMCAGAGAAGTNH | SWMCAGAGAAGTNHCTGGCC | 3009 | 3477 |
| | CTGGCCTCCTWGGACTTTTGGCGGAGGGACCAAG | TCCTWGGACT | | |
| VK3-11_5_2_10 | CCTGAAGATTTTGCAGTTTATTACTGTSWMCAGAGAAGTAA | SWMCAGAGAAGTAATYWCCC | 3010 | 3478 |
| | TYWCCCTCCTWGGACTTTTGGCGGAGGGACCAAG | TCCTWGGACT | | |
| VK3-11_6_2_10 | CCTGAAGATTTTGCAGTTTATTACTGTCAGSWMBHCAGTAA | CAGSWMBHCAGTAATTGGCC | 3011 | 3479 |
| | TTGGCCTCCTWGGACTTTTGGCGGAGGGACCAAG | TCCTWGGACT | | |
| VK3-11_7_2_10 | CCTGAAGATTTTGCAGTTTATTACTGTCAGSWMAGANHCAA | CAGSWMAGANHCAATTGGCC | 3012 | 3480 |
| | TTGGCCTCCTWGGACTTTTGGCGGAGGGACCAAG | TCCTWGGACT | | |
| VK3-11_8_2_10 | CCTGAAGATTTTGCAGTTTATTACTGTCAGSWMAGAAGTNH | CAGSWMAGAAGTNHCTGGCC | 3013 | 3481 |
| | CTGGCCTCCTWGGACTTTTGGCGGAGGGACCAAG | TCCTWGGACT | | |
| VK3-11_9_2_10 | CCTGAAGATTTTGCAGTTTATTACTGTCAGSWMAGAAGTAA | CAGSWMAGAAGTAATYWCCC | 3014 | 3482 |
| | TYWCCCTCCTWGGACTTTTGGCGGAGGGACCAAG | TCCTWGGACT | | |
| VK3-15_1_0_10 | CAGTCTGAAGATTTTGCAGTTTATTACTGTSWMSWMTACAA | SWMSWMTACAATAATTGGCC | 3015 | 3483 |
| | TAATTGGCCTCCTTWCACTTTTGGCGGAGGGACCAAG | TCCTTWCACT | | |
| VK3-15_10_0_10 | CAGTCTGAAGATTTTGCAGTTTATTACTGTCAGCAGBHCNH | CAGCAGBHCNHCAATTGGCC | 3016 | 3439 |
| | CAATTGGCCTCCTTWCACTTTTGGCGGAGGGACCAAG | TCCTTWCACT | | |
| VK3-15_11_0_10 | CAGTCTGAAGATTTTGCAGTTTATTACTGTCAGCAGBHCAA | CAGCAGBHCAATNHCTGGCC | 3017 | 3484 |
| | TNHCTGGCCTCCTTWCACTTTTGGCGGAGGGACCAAG | TCCTTWCACT | | |
| VK3-15_12_0_10 | CAGTCTGAAGATTTTGCAGTTTATTACTGTCAGCAGBHCAA | CAGCAGBHCAATAATYWCCC | 3018 | 3485 |
| | TAATYWCCCTCCTTWCACTTTTGGCGGAGGGACCAAG | TCCTTWCACT | | |
| VK3-15_13_0_10 | CAGTCTGAAGATTTTGCAGTTTATTACTGTCAGCAGTACNH | CAGCAGTACNHCNHCTGGCC | 3019 | 3486 |
| | CNHCTGGCCTCCTTWCACTTTTGGCGGAGGGACCAAG | TCCTTWCACT | | |
| VK3-15_14_0_10 | CAGTCTGAAGATTTTGCAGTTTATTACTGTCAGCAGTACNH | CAGCAGTACNHCAATYWCCC | 3020 | 3308 |
| | CAATYWCCCTCCTTWCACTTTTGGCGGAGGGACCAAG | TCCTTWCACT | | |
| VK3-15_15_0_10 | CAGTCTGAAGATTTTGCAGTTTATTACTGTCAGCAGTACAA | CAGCAGTACAATNHCYWCCC | 3021 | 3487 |
| | TNHCYWCCCTCCTTWCACTTTTGGCGGAGGGACCAAG | TCCTTWCACT | | |
| VK3-15_2_0_10 | CAGTCTGAAGATTTTGCAGTTTATTACTGTSWMCAGBHCAA | SWMCAGBHCAATAATTGGCC | 3022 | 3488 |
| | TAATTGGCCTCCTTWCACTTTTGGCGGAGGGACCAAG | TCCTTWCACT | | |
| VK3-15_3_0_10 | CAGTCTGAAGATTTTGCAGTTTATTACTGTSWMCAGTACNH | SWMCAGTACNHCAATTGGCC | 3023 | 3489 |
| | CAATTGGCCTCCTTWCACTTTTGGCGGAGGGACCAAG | TCCTTWCACT | | |
| VK3-15_4_0_10 | CAGTCTGAAGATTTTGCAGTTTATTACTGTSWMCAGTACAA | SWMCAGTACAATNHCTGGCC | 3024 | 3490 |
| | TNHCTGGCCTCCTTWCACTTTTGGCGGAGGGACCAAG | TCCTTWCACT | | |
| VK3-15_5_0_10 | CAGTCTGAAGATTTTGCAGTTTATTACTGTSWMCAGTACAA | SWMCAGTACAATAATYWCCC | 3025 | 3491 |
| | TAATYWCCCTCCTTWCACTTTTGGCGGAGGGACCAAG | TCCTTWCACT | | |
| VK3-15_6_0_10 | CAGTCTGAAGATTTTGCAGTTTATTACTGTCAGSWMBHCAA | CAGSWMBHCAATAATTGGCC | 3026 | 3492 |
| | TAATTGGCCTCCTTWCACTTTTGGCGGAGGGACCAAG | TCCTTWCACT | | |
| VK3-15_7_0_10 | CAGTCTGAAGATTTTGCAGTTTATTACTGTCAGSWMTACNH | CAGSWMTACNHCAATTGGCC | 3027 | 3493 |
| | CAATTGGCCTCCTTWCACTTTTGGCGGAGGGACCAAG | TCCTTWCACT | | |
| VK3-15_8_0_10 | CAGTCTGAAGATTTTGCAGTTTATTACTGTCAGSWMTACAA | CAGSWMTACAATNHCTGGCC | 3028 | 3494 |
| | TNHCTGGCCTCCTTWCACTTTTGGCGGAGGGACCAAG | TCCTTWCACT | | |
| VK3-15_9_0_10 | CAGTCTGAAGATTTTGCAGTTTATTACTGTCAGSWMTACAA | CAGSWMTACAATAATYWCCC | 3029 | 3495 |
| | TAATYWCCCTCCTTWCACTTTTGGCGGAGGGACCAAG | TCCTTWCACT | | |
| VK3-15_1_1_10 | CAGTCTGAAGATTTTGCAGTTTATTACTGTSWMSWMTACAA | SWMSWMTACAATAATTGGCC | 3030 | 3496 |
| | TAATTGGCCTCCTMTCACTTTTGGCGGAGGGACCAAG | TCCTMTCACT | | |
| VK3-15_10_1_10 | CAGTCTGAAGATTTTGCAGTTTATTACTGTCAGCAGBHCNH | CAGCAGBHCNHCAATTGGCC | 3031 | 3454 |
| | CAATTGGCCTCCTMTCACTTTTGGCGGAGGGACCAAG | TCCTMTCACT | | |
| VK3-15_11_1_10 | CAGTCTGAAGATTTTGCAGTTTATTACTGTCAGCAGBHCAA | CAGCAGBHCAATNHCTGGCC | 3032 | 3497 |
| | TNHCTGGCCTCCTMTCACTTTTGGCGGAGGGACCAAG | TCCTMTCACT | | |
| VK3-15_12_1_10 | CAGTCTGAAGATTTTGCAGTTTATTACTGTCAGCAGBHCAA | CAGCAGBHCAATAATYWCCC | 3033 | 3498 |
| | TAATYWCCCTCCTMTCACTTTTGGCGGAGGGACCAAG | TCCTMTCACT | | |
| VK3-15_13_1_10 | CAGTCTGAAGATTTTGCAGTTTATTACTGTCAGCAGTACNH | CAGCAGTACNHCNHCTGGCC | 3034 | 3499 |
| | CNHCTGGCCTCCTMTCACTTTTGGCGGAGGGACCAAG | TCCTMTCACT | | |
| VK3-15_14_1_10 | CAGTCTGAAGATTTTGCAGTTTATTACTGTCAGCAGTACNH | CAGCAGTACNHCAATYWCCC | 3035 | 3323 |
| | CAATYWCCCTCCTMTCACTTTTGGCGGAGGGACCAAG | TCCTMTCACT | | |
| VK3-15_15_1_10 | CAGTCTGAAGATTTTGCAGTTTATTACTGTCAGCAGTACAA | CAGCAGTACAATNHCYWCCC | 3036 | 3500 |
| | TNHCYWCCCTCCTMTCACTTTTGGCGGAGGGACCAAG | TCCTMTCACT | | |
| VK3-15_2_1_10 | CAGTCTGAAGATTTTGCAGTTTATTACTGTSWMCAGBHCAA | SWMCAGBHCAATAATTGGCC | 3037 | 3501 |
| | TAATTGGCCTCCTMTCACTTTTGGCGGAGGGACCAAG | TCCTMTCACT | | |
| VK3-15_3_1_10 | CAGTCTGAAGATTTTGCAGTTTATTACTGTSWMCAGTACNH | SWMCAGTACNHCAATTGGCC | 3038 | 3502 |
| | CAATTGGCCTCCTMTCACTTTTGGCGGAGGGACCAAG | TCCTMTCACT | | |
| VK3-15_4_1_10 | CAGTCTGAAGATTTTGCAGTTTATTACTGTSWMCAGTACAA | SWMCAGTACAATNHCTGGCC | 3039 | 3503 |
| | TNHCTGGCCTCCTMTCACTTTTGGCGGAGGGACCAAG | TCCTMTCACT | | |
| VK3-15_5_1_10 | CAGTCTGAAGATTTTGCAGTTTATTACTGTSWMCAGTACAA | SWMCAGTACAATAATYWCCC | 3040 | 3504 |
| | TAATYWCCCTCCTMTCACTTTTGGCGGAGGGACCAAG | TCCTMTCACT | | |
| VK3-15_6_1_10 | CAGTCTGAAGATTTTGCAGTTTATTACTGTCAGSWMBHCAA | CAGSWMBHCAATAATTGGCC | 3041 | 3505 |
| | TAATTGGCCTCCTMTCACTTTTGGCGGAGGGACCAAG | TCCTMTCACT | | |
| VK3-15_7_1_10 | CAGTCTGAAGATTTTGCAGTTTATTACTGTCAGSWMTACNH | CAGSWMTACNHCAATTGGCC | 3042 | 3506 |
| | CAATTGGCCTCCTMTCACTTTTGGCGGAGGGACCAAG | TCCTMTCACT | | |
| VK3-15_8_1_10 | CAGTCTGAAGATTTTGCAGTTTATTACTGTCAGSWMTACAA | CAGSWMTACAATNHCTGGCC | 3043 | 3507 |
| | TNHCTGGCCTCCTMTCACTTTTGGCGGAGGGACCAAG | TCCTMTCACT | | |
| VK3-15_9_1_10 | CAGTCTGAAGATTTTGCAGTTTATTACTGTCAGSWMTACAA | CAGSWMTACAATAATYWCCC | 3044 | 3508 |
| | TAATYWCCCTCCTMTCACTTTTGGCGGAGGGACCAAG | TCCTMTCACT | | |
| VK3-15_1_2_10 | CAGTCTGAAGATTTTGCAGTTTATTACTGTSWMSWMTACAA | SWMSWMTACAATAATTGGCC | 3045 | 3509 |
| | TAATTGGCCTCCTWGGACTTTTGGCGGAGGGACCAAG | TCCTWGGACT | | |
| VK3-15_10_2_10 | CAGTCTGAAGATTTTGCAGTTTATTACTGTCAGCAGBHCNH | CAGCAGBHCNHCAATTGGCC | 3046 | 3469 |
| | CAATTGGCCTCCTWGGACTTTTGGCGGAGGGACCAAG | TCCTWGGACT | | |
| VK3-15_11_2_10 | CAGTCTGAAGATTTTGCAGTTTATTACTGTCAGCAGBHCAA | CAGCAGBHCAATNHCTGGCC | 3047 | 3510 |
| | TNHCTGGCCTCCTWGGACTTTTGGCGGAGGGACCAAG | TCCTWGGACT | | |
| VK3-15_12_2_10 | CAGTCTGAAGATTTTGCAGTTTATTACTGTCAGCAGBHCAA | CAGCAGBHCAATAATYWCCC | 3048 | 3511 |
| | TAATYWCCCTCCTWGGACTTTTGGCGGAGGGACCAAG | TCCTWGGACT | | |
| VK3-15_13_2_10 | CAGTCTGAAGATTTTGCAGTTTATTACTGTCAGCAGTACNH | CAGCAGTACNHCNHCTGGCC | 3049 | 3512 |
| | CNHCTGGCCTCCTWGGACTTTTGGCGGAGGGACCAAG | TCCTWGGACT | | |
| VK3-15_14_2_10 | CAGTCTGAAGATTTTGCAGTTTATTACTGTCAGCAGTACNH | CAGCAGTACNHCAATYWCCC | 3050 | 3338 |
| | CAATYWCCCTCCTWGGACTTTTGGCGGAGGGACCAAG | TCCTWGGACT | | |
| VK3-15_15_2_10 | CAGTCTGAAGATTTTGCAGTTTATTACTGTCAGCAGTACAA | CAGCAGTACAATNHCYWCCC | 3051 | 3513 |
| | TNHCYWCCCTCCTWGGACTTTTGGCGGAGGGACCAAG | TCCTWGGACT | | |
| VK3-15_2_2_10 | CAGTCTGAAGATTTTGCAGTTTATTACTGTSWMCAGBHCAA | SWMCAGBHCAATAATTGGCC | 3052 | 3514 |
| | TAATTGGCCTCCTWGGACTTTTGGCGGAGGGACCAAG | TCCTWGGACT | | |
| VK3-15_3_2_10 | CAGTCTGAAGATTTTGCAGTTTATTACTGTSWMCAGTACNH | SWMCAGTACNHCAATTGGCC | 3053 | 3515 |
| | CAATTGGCCTCCTWGGACTTTTGGCGGAGGGACCAAG | TCCTWGGACT | | |
| VK3-15_4_2_10 | CAGTCTGAAGATTTTGCAGTTTATTACTGTSWMCAGTACAA | SWMCAGTACAATNHCTGGCC | 3054 | 3516 |
| | TNHCTGGCCTCCTWGGACTTTTGGCGGAGGGACCAAG | TCCTWGGACT | | |
| VK3-15_5_2_10 | CAGTCTGAAGATTTTGCAGTTTATTACTGTSWMCAGTACAA | SWMCAGTACAATAATYWCCC | 3055 | 3517 |
| | TAATYWCCCTCCTWGGACTTTTGGCGGAGGGACCAAG | TCCTWGGACT | | |
| VK3-15_6_2_10 | CAGTCTGAAGATTTTGCAGTTTATTACTGTCAGSWMBHCAA | CAGSWMBHCAATAATTGGCC | 3056 | 3518 |
| | TAATTGGCCTCCTWGGACTTTTGGCGGAGGGACCAAG | TCCTWGGACT | | |
| VK3-15_7_2_10 | CAGTCTGAAGATTTTGCAGTTTATTACTGTCAGSWMTACNH | CAGSWMTACNHCAATTGGCC | 3057 | 3519 |
| | CAATTGGCCTCCTWGGACTTTTGGCGGAGGGACCAAG | TCCTWGGACT | | |
| VK3-15_8_2_10 | CAGTCTGAAGATTTTGCAGTTTATTACTGTCAGSWMTACAA | CAGSWMTACAATNHCTGGCC | 3058 | 3520 |
| | TNHCTGGCCTCCTWGGACTTTTGGCGGAGGGACCAAG | TCCTWGGACT | | |
| VK3-15_9_2_10 | CAGTCTGAAGATTTTGCAGTTTATTACTGTCAGSWMTACAA | CAGSWMTACAATAATYWCCC | 3059 | 3521 |
| | TAATYWCCCTCCTWGGACTTTTGGCGGAGGGACCAAG | TCCTWGGACT | | |
| VK3-20_1_0_10 | CCTGAAGATTTTGCAGTGTATTACTGTSWMSWMTACGGAAG | SWMSWMTACGGAAGTAGTCC | 3060 | 3522 |
| | TAGTCCTCCTTWCACTTTTGGCGGAGGGACCAAG | TCCTTWCACT | | |
| VK3-20_10_0_10 | CCTGAAGATTTTGCAGTGTATTACTGTCAGCAGBHCBHCAG | CAGCAGBHCBHCAGTAGTCC | 3061 | 3523 |
| | TAGTCCTCCTTWCACTTTTGGCGGAGGGACCAAG | TCCTTWCACT | | |
| VK3-20_11_0_10 | CCTGAAGATTTTGCAGTGTATTACTGTCAGCAGBHCGGAVN | CAGCAGBHCGGAVNCAGTCC | 3062 | 3524 |
| | CAGTCCTCCTTWCACTTTTGGCGGAGGGACCAAG | TCCTTWCACT | | |
| VK3-20_12_0_10 | CCTGAAGATTTTGCAGTGTATTACTGTCAGCAGBHCGGAAG | CAGCAGBHCGGAAGTBHCCC | 3063 | 3525 |
| | TBHCCCTCCTTWCACTTTTGGCGGAGGGACCAAG | TCCTTWCACT | | |
| VK3-20_13_0_10 | CCTGAAGATTTTGCAGTGTATTACTGTCAGCAGTACBHCVN | CAGCAGTACBHCVNCAGTCC | 3064 | 3526 |
| | CAGTCCTCCTTWCACTTTTGGCGGAGGGACCAAG | TCCTTWCACT | | |
| VK3-20_14_0_10 | CCTGAAGATTTTGCAGTGTATTACTGTCAGCAGTACBHCAG | CAGCAGTACBHCAGTBHCCC | 3065 | 3527 |
| | TBHCCCTCCTTWCACTTTTGGCGGAGGGACCAAG | TCCTTWCACT | | |
| VK3-20_15_0_10 | CCTGAAGATTTTGCAGTGTATTACTGTCAGCAGTACGGAVN | CAGCAGTACGGAVNCBHCCC | 3066 | 3528 |
| | CBHCCCTCCTTWCACTTTTGGCGGAGGGACCAAG | TCCTTWCACT | | |
| VK3-20_2_0_10 | CCTGAAGATTTTGCAGTGTATTACTGTSWMCAGBHCGGAAG | SWMCAGBHCGGAAGTAGTCC | 3067 | 3529 |
| | TAGTCCTCCTTWCACTTTTGGCGGAGGGACCAAG | TCCTTWCACT | | |
| VK3-20_3_0_10 | CCTGAAGATTTTGCAGTGTATTACTGTSWMCAGTACBHCAG | SWMCAGTACBHCAGTAGTCC | 3068 | 3530 |
| | TAGTCCTCCTTWCACTTTTGGCGGAGGGACCAAG | TCCTTWCACT | | |
| VK3-20_4_0_10 | CCTGAAGATTTTGCAGTGTATTACTGTSWMCAGTACGGAVN | SWMCAGTACGGAVNCAGTCC | 3069 | 3531 |
| | CAGTCCTCCTTWCACTTTTGGCGGAGGGACCAAG | TCCTTWCACT | | |
| VK3-20_5_0_10 | CCTGAAGATTTTGCAGTGTATTACTGTSWMCAGTACGGAAG | SWMCAGTACGGAAGTBHCCC | 3070 | 3532 |
| | TBHCCCTCCTTWCACTTTTGGCGGAGGGACCAAG | TCCTTWCACT | | |
| VK3-20_6_0_10 | CCTGAAGATTTTGCAGTGTATTACTGTCAGSWMBHCGGAAG | CAGSWMBHCGGAAGTAGTCC | 3071 | 3533 |
| | TAGTCCTCCTTWCACTTTTGGCGGAGGGACCAAG | TCCTTWCACT | | |
| VK3-20_7_0_10 | CCTGAAGATTTTGCAGTGTATTACTGTCAGSWMTACBHCAG | CAGSWMTACBHCAGTAGTCC | 3072 | 3534 |
| | TAGTCCTCCTTWCACTTTTGGCGGAGGGACCAAG | TCCTTWCACT | | |
| VK3-20_8_0_10 | CCTGAAGATTTTGCAGTGTATTACTGTCAGSWMTACGGAVN | CAGSWMTACGGAVNCAGTCC | 3073 | 3535 |
| | CAGTCCTCCTTWCACTTTTGGCGGAGGGACCAAG | TCCTTWCACT | | |
| VK3-20_9_0_10 | CCTGAAGATTTTGCAGTGTATTACTGTCAGSWMTACGGAAG | CAGSWMTACGGAAGTBHCCC | 3074 | 3536 |
| | TBHCCCTCCTTWCACTTTTGGCGGAGGGACCAAG | TCCTTWCACT | | |
| VK3-20_1_1_10 | CCTGAAGATTTTGCAGTGTATTACTGTSWMSWMTACGGAAG | SWMSWMTACGGAAGTAGTCC | 3075 | 3537 |
| | TAGTCCTCCTMTCACTTTTGGCGGAGGGACCAAG | TCCTMTCACT | | |
| VK3-20_10_1_10 | CCTGAAGATTTTGCAGTGTATTACTGTCAGCAGBHCBHCAG | CAGCAGBHCBHCAGTAGTCC | 3076 | 3538 |
| | TAGTCCTCCTMTCACTTTTGGCGGAGGGACCAAG | TCCTMTCACT | | |
| VK3-20_11_1_10 | CCTGAAGATTTTGCAGTGTATTACTGTCAGCAGBHCGGAVN | CAGCAGBHCGGAVNCAGTCC | 3077 | 3539 |
| | CAGTCCTCCTMTCACTTTTGGCGGAGGGACCAAG | TCCTMTCACT | | |
| VK3-20_12_1_10 | CCTGAAGATTTTGCAGTGTATTACTGTCAGCAGBHCGGAAG | CAGCAGBHCGGAAGTBHCCC | 3078 | 3540 |
| | TBHCCCTCCTMTCACTTTTGGCGGAGGGACCAAG | TCCTMTCACT | | |
| VK3-20_13_1_10 | CCTGAAGATTTTGCAGTGTATTACTGTCAGCAGTACBHCVN | CAGCAGTACBHCVNCAGTCC | 3079 | 3541 |
| | CAGTCCTCCTMTCACTTTTGGCGGAGGGACCAAG | TCCTMTCACT | | |
| VK3-20_14_1_10 | CCTGAAGATTTTGCAGTGTATTACTGTCAGCAGTACBHCAG | CAGCAGTACBHCAGTBHCCC | 3080 | 3542 |
| | TBHCCCTCCTMTCACTTTTGGCGGAGGGACCAAG | TCCTMTCACT | | |
| VK3-20_15_1_10 | CCTGAAGATTTTGCAGTGTATTACTGTCAGCAGTACGGAVN | CAGCAGTACGGAVNCBHCCC | 3081 | 3543 |
| | CBHCCCTCCTMTCACTTTTGGCGGAGGGACCAAG | TCCTMTCACT | | |
| VK3-20_2_1_10 | CCTGAAGATTTTGCAGTGTATTACTGTSWMCAGBHCGGAAG | SWMCAGBHCGGAAGTAGTCC | 3082 | 3544 |
| | TAGTCCTCCTMTCACTTTTGGCGGAGGGACCAAG | TCCTMTCACT | | |
| VK3-20_3_1_10 | CCTGAAGATTTTGCAGTGTATTACTGTSWMCAGTACBHCAG | SWMCAGTACBHCAGTAGTCC | 3083 | 3545 |
| | TAGTCCTCCTMTCACTTTTGGCGGAGGGACCAAG | TCCTMTCACT | | |
| VK3-20_4_1_10 | CCTGAAGATTTTGCAGTGTATTACTGTSWMCAGTACGGAVN | SWMCAGTACGGAVNCAGTCC | 3084 | 3546 |
| | CAGTCCTCCTMTCACTTTTGGCGGAGGGACCAAG | TCCTMTCACT | | |
| VK3-20_5_1_10 | CCTGAAGATTTTGCAGTGTATTACTGTSWMCAGTACGGAAG | SWMCAGTACGGAAGTBHCCC | 3085 | 3547 |
| | TBHCCCTCCTMTCACTTTTGGCGGAGGGACCAAG | TCCTMTCACT | | |
| VK3-20_6_1_10 | CCTGAAGATTTTGCAGTGTATTACTGTCAGSWMBHCGGAAG | CAGSWMBHCGGAAGTAGTCC | 3086 | 3548 |
| | TAGTCCTCCTMTCACTTTTGGCGGAGGGACCAAG | TCCTMTCACT | | |
| VK3-20_7_1_10 | CCTGAAGATTTTGCAGTGTATTACTGTCAGSWMTACBHCAG | CAGSWMTACBHCAGTAGTCC | 3087 | 3549 |
| | TAGTCCTCCTMTCACTTTTGGCGGAGGGACCAAG | TCCTMTCACT | | |
| VK3-20_8_1_10 | CCTGAAGATTTTGCAGTGTATTACTGTCAGSWMTACGGAVN | CAGSWMTACGGAVNCAGTCC | 3088 | 3550 |
| | CAGTCCTCCTMTCACTTTTGGCGGAGGGACCAAG | TCCTMTCACT | | |
| VK3-20_9_1_10 | CCTGAAGATTTTGCAGTGTATTACTGTCAGSWMTACGGAAG | CAGSWMTACGGAAGTBHCCC | 3089 | 3551 |
| | TBHCCCTCCTMTCACTTTTGGCGGAGGGACCAAG | TCCTMTCACT | | |
| VK3-20_1_2_10 | CCTGAAGATTTTGCAGTGTATTACTGTSWMSWMTACGGAAG | SWMSWMTACGGAAGTAGTCC | 3090 | 3552 |
| | TAGTCCTCCTWGGACTTTTGGCGGAGGGACCAAG | TCCTWGGACT | | |
| VK3-20_10_2_10 | CCTGAAGATTTTGCAGTGTATTACTGTCAGCAGBHCBHCAG | CAGCAGBHCBHCAGTAGTCC | 3091 | 3553 |
| | TAGTCCTCCTWGGACTTTTGGCGGAGGGACCAAG | TCCTWGGACT | | |
| VK3-20_11_2_10 | CCTGAAGATTTTGCAGTGTATTACTGTCAGCAGBHCGGAVN | CAGCAGBHCGGAVNCAGTCC | 3092 | 3554 |
| | CAGTCCTCCTWGGACTTTTGGCGGAGGGACCAAG | TCCTWGGACT | | |
| VK3-20_12_2_10 | CCTGAAGATTTTGCAGTGTATTACTGTCAGCAGBHCGGAAG | CAGCAGBHCGGAAGTBHCCC | 3093 | 3555 |
| | TBHCCCTCCTWGGACTTTTGGCGGAGGGACCAAG | TCCTWGGACT | | |
| VK3-20_13_2_10 | CCTGAAGATTTTGCAGTGTATTACTGTCAGCAGTACBHCVN | CAGCAGTACBHCVNCAGTCC | 3094 | 3556 |
| | CAGTCCTCCTWGGACTTTTGGCGGAGGGACCAAG | TCCTWGGACT | | |
| VK3-20_14_2_10 | CCTGAAGATTTTGCAGTGTATTACTGTCAGCAGTACBHCAG | CAGCAGTACBHCAGTBHCCC | 3095 | 3557 |
| | TBHCCCTCCTWGGACTTTTGGCGGAGGGACCAAG | TCCTWGGACT | | |
| VK3-20_15_2_10 | CCTGAAGATTTTGCAGTGTATTACTGTCAGCAGTACGGAVN | CAGCAGTACGGAVNCBHCCC | 3096 | 3558 |
| | CBHCCCTCCTWGGACTTTTGGCGGAGGGACCAAG | TCCTWGGACT | | |
| VK3-20_2_2_10 | CCTGAAGATTTTGCAGTGTATTACTGTSWMCAGBHCGGAAG | SWMCAGBHCGGAAGTAGTCC | 3097 | 3559 |
| | TAGTCCTCCTWGGACTTTTGGCGGAGGGACCAAG | TCCTWGGACT | | |
| VK3-20_3_2_10 | CCTGAAGATTTTGCAGTGTATTACTGTSWMCAGTACBHCAG | SWMCAGTACBHCAGTAGTCC | 3098 | 3560 |
| | TAGTCCTCCTWGGACTTTTGGCGGAGGGACCAAG | TCCTWGGACT | | |
| VK3-20_4_2_10 | CCTGAAGATTTTGCAGTGTATTACTGTSWMCAGTACGGAVN | SWMCAGTACGGAVNCAGTCC | 3099 | 3561 |
| | CAGTCCTCCTWGGACTTTTGGCGGAGGGACCAAG | TCCTWGGACT | | |
| VK3-20_5_2_10 | CCTGAAGATTTTGCAGTGTATTACTGTSWMCAGTACGGAAG | SWMCAGTACGGAAGTBHCCC | 3100 | 3562 |
| | TBHCCCTCCTWGGACTTTTGGCGGAGGGACCAAG | TCCTWGGACT | | |
| VK3-20_6_2_10 | CCTGAAGATTTTGCAGTGTATTACTGTCAGSWMBHCGGAAG | CAGSWMBHCGGAAGTAGTCC | 3101 | 3563 |
| | TAGTCCTCCTWGGACTTTTGGCGGAGGGACCAAG | TCCTWGGACT | | |
| VK3-20_7_2_10 | CCTGAAGATTTTGCAGTGTATTACTGTCAGSWMTACBHCAG | CAGSWMTACBHCAGTAGTCC | 3102 | 3564 |
| | TAGTCCTCCTWGGACTTTTGGCGGAGGGACCAAG | TCCTWGGACT | | |
| VK3-20_8_2_10 | CCTGAAGATTTTGCAGTGTATTACTGTCAGSWMTACGGAVN | CAGSWMTACGGAVNCAGTCC | 3103 | 3565 |
| | CAGTCCTCCTWGGACTTTTGGCGGAGGGACCAAG | TCCTWGGACT | | |
| VK3-20_9_2_10 | CCTGAAGATTTTGCAGTGTATTACTGTCAGSWMTACGGAAG | CAGSWMTACGGAAGTBHCCC | 3104 | 3566 |
| | TBHCCCTCCTWGGACTTTTGGCGGAGGGACCAAG | TCCTWGGACT | | |

Jumping Trimer

| | | | | |
|---|---|---|---|---|
| VK1-05_t1_0_10 | CCTGATGATTTTGCAACTTATTACTGCCAGCAGBHCVRMMBCTACY | CAGCAGBHCVRMMBCTACYCTCC | 3105 | 3567 |
| | CTCCTTWCACTTTTGGCGGAGGGACCAAG | TTWCACT | | |
| VK1-05_t1_1_10 | CCTGATGATTTTGCAACTTATTACTGCCAGCAGBHCVRMMBCTACY | CAGCAGBHCVRMMBCTACYCTCC | 3106 | 3568 |
| | CTCCTMTCACTTTTGGCGGAGGGACCAAG | TMTCACT | | |
| VK1-05_t1_2_10 | CCTGATGATTTTGCAACTTATTACTGCCAGCAGBHCVRMMBCTACY | CAGCAGBHCVRMMBCTACYCTCC | 3107 | 3569 |
| | CTCCTWGGACTTTTGGCGGAGGGACCAAG | TWGGACT | | |
| VK1-05_t2_0_10 | CCTGATGATTTTGCAACTTATTACTGCCAGCAGBHCAATMBCYWCY | CAGCAGBHCAATMBCYWCYCTCC | 3108 | 3570 |
| | CTCCTTWCACTTTTGGCGGAGGGACCAAG | TTWCACT | | |
| VK1-05_t2_1_10 | CCTGATGATTTTGCAACTTATTACTGCCAGCAGBHCAATMBCYWCY | CAGCAGBHCAATMBCYWCYCTCC | 3109 | 3571 |
| | CTCCTMTCACTTTTGGCGGAGGGACCAAG | TMTCACT | | |
| VK1-05_t2_2_10 | CCTGATGATTTTGCAACTTATTACTGCCAGCAGBHCAATMBCYWCY | CAGCAGBHCAATMBCYWCYCTCC | 3110 | 3572 |
| | CTCCTWGGACTTTTGGCGGAGGGACCAAG | TWGGACT | | |
| VK1-05_t3_0_10 | CCTGATGATTTTGCAACTTATTACTGCCAGCAGBHCVRMAGTYWCY | CAGCAGBHCVRMAGTYWCYCTCC | 3111 | 3573 |
| | CTCCTTWCACTTTTGGCGGAGGGACCAAG | TTWCACT | | |
| VK1-05_t3_1_10 | CCTGATGATTTTGCAACTTATTACTGCCAGCAGBHCVRMAGTYWCY | CAGCAGBHCVRMAGTYWCYCTCC | 3112 | 3574 |
| | CTCCTMTCACTTTTGGCGGAGGGACCAAG | TMTCACT | | |
| VK1-05_t3_2_10 | CCTGATGATTTTGCAACTTATTACTGCCAGCAGBHCVRMAGTYWCY | CAGCAGBHCVRMAGTYWCYCTCC | 3113 | 3575 |
| | CTCCTWGGACTTTTGGCGGAGGGACCAAG | TWGGACT | | |
| VK1-05_t4_0_10 | CCTGATGATTTTGCAACTTATTACTGCCAGCAGTACVRMMBCYWCY | CAGCAGTACVRMMBCYWCYCTCC | 3114 | 3576 |
| | CTCCTTWCACTTTTGGCGGAGGGACCAAG | TTWCACT | | |
| VK1-05_t4_1_10 | CCTGATGATTTTGCAACTTATTACTGCCAGCAGTACVRMMBCYWCY | CAGCAGTACVRMMBCYWCYCTCC | 3115 | 3577 |
| | CTCCTMTCACTTTTGGCGGAGGGACCAAG | TMTCACT | | |
| VK1-05_t4_2_10 | CCTGATGATTTTGCAACTTATTACTGCCAGCAGTACVRMMBCYWCY | CAGCAGTACVRMMBCYWCYCTCC | 3116 | 3578 |
| | CTCCTWGGACTTTTGGCGGAGGGACCAAG | TWGGACT | | |
| VK1-12_t1_0_10 | CCTGAAGATTTTGCAACTTATTACTGTCAGCAGRNANHCNHCTTCC | CAGCAGRNANHCNHCTTCCCTCC | 3117 | 3579 |
| | CTCCTTWCACTTTTGGCGGAGGGACCAAG | TTWCACT | | |
| VK1-12_t1_1_10 | CCTGAAGATTTTGCAACTTATTACTGTCAGCAGRNANHCNHCTTCC | CAGCAGRNANHCNHCTTCCCTCC | 3118 | 3580 |
| | CTCCTMTCACTTTTGGCGGAGGGACCAAG | TMTCACT | | |
| VK1-12_t1_2_10 | CCTGAAGATTTTGCAACTTATTACTGTCAGCAGRNANHCNHCTTCC | CAGCAGRNANHCNHCTTCCCTCC | 3119 | 3581 |
| | CTCCTWGGACTTTTGGCGGAGGGACCAAG | TWGGACT | | |
| VK1-12_t2_0_10 | CCTGAAGATTTTGCAACTTATTACTGTCAGCAGRNANHCAGTYWCC | CAGCAGRNANHCAGTYWCCCTCC | 3120 | 3582 |
| | CTCCTTWCACTTTTGGCGGAGGGACCAAG | TTWCACT | | |
| VK1-12_t2_1_10 | CCTGAAGATTTTGCAACTTATTACTGTCAGCAGRNANHCAGTYWCC | CAGCAGRNANHCAGTYWCCCTCC | 3121 | 3583 |
| | CTCCTMTCACTTTTGGCGGAGGGACCAAG | TMTCACT | | |
| VK1-12_t2_2_10 | CCTGAAGATTTTGCAACTTATTACTGTCAGCAGRNANHCAGTYWCC | CAGCAGRNANHCAGTYWCCCTCC | 3122 | 3584 |
| | CTCCTWGGACTTTTGGCGGAGGGACCAAG | TWGGACT | | |
| VK1-12_t3_0_10 | CCTGAAGATTTTGCAACTTATTACTGTCAGCAGRNAAATNHCYWCC | CAGCAGRNAAATNHCYWCCCTCC | 3123 | 3585 |
| | CTCCTTWCACTTTTGGCGGAGGGACCAAG | TTWCACT | | |
| VK1-12_t3_1_10 | CCTGAAGATTTTGCAACTTATTACTGTCAGCAGRNAAATNHCYWCC | CAGCAGRNAAATNHCYWCCCTCC | 3124 | 3586 |
| | CTCCTMTCACTTTTGGCGGAGGGACCAAG | TMTCACT | | |
| VK1-12_t3_2_10 | CCTGAAGATTTTGCAACTTATTACTGTCAGCAGRNAAATNHCYWCC | CAGCAGRNAAATNHCYWCCCTCC | 3125 | 3587 |
| | CTCCTWGGACTTTTGGCGGAGGGACCAAG | TWGGACT | | |
| VK1-12_t4_0_10 | CCTGAAGATTTTGCAACTTATTACTGTCAGCAGGCANHCNHCYWCC | CAGCAGGCANHCNHCYWCCCTCC | 3126 | 3588 |
| | CTCCTTWCACTTTTGGCGGAGGGACCAAG | TTWCACT | | |
| VK1-12_t4_1_10 | CCTGAAGATTTTGCAACTTATTACTGTCAGCAGGCANHCNHCYWCC | CAGCAGGCANHCNHCYWCCCTCC | 3127 | 3589 |
| | CTCCTMTCACTTTTGGCGGAGGGACCAAG | TMTCACT | | |
| VK1-12_t4_2_10 | CCTGAAGATTTTGCAACTTATTACTGTCAGCAGGCANHCNHCYWCC | CAGCAGGCANHCNHCYWCCCTCC | 3128 | 3590 |
| | CTCCTWGGACTTTTGGCGGAGGGACCAAG | TWGGACT | | |
| VK1-33_t1_0_10 | CCTGAAGATATTGCAACATATTACTGTCAGCAGBHCNHCNHCCTCC | CAGCAGBHCNHCNHCCTCCCTCC | 3129 | 3591 |
| | CTCCTTWCACTTTTGGCGGAGGGACCAAG | TTWCACT | | |
| VK1-33_t1_1_10 | CCTGAAGATATTGCAACATATTACTGTCAGCAGBHCNHCNHCCTCC | CAGCAGBHCNHCNHCCTCCCTCC | 3130 | 3592 |
| | CTCCTMTCACTTTTGGCGGAGGGACCAAG | TMTCACT | | |
| VK1-33_t1_2_10 | CCTGAAGATATTGCAACATATTACTGTCAGCAGBHCNHCNHCCTCC | CAGCAGBHCNHCNHCCTCCCTCC | 3131 | 3593 |
| | CTCCTWGGACTTTTGGCGGAGGGACCAAG | TWGGACT | | |
| VK1-33_t2_0_10 | CCTGAAGATATTGCAACATATTACTGTCAGCAGBHCNHCAATYWCC | CAGCAGBHCNHCAATYWCCCTCC | 3132 | 3594 |
| | CTCCTTWCACTTTTGGCGGAGGGACCAAG | TTWCACT | | |
| VK1-33_t2_1_10 | CCTGAAGATATTGCAACATATTACTGTCAGCAGBHCNHCAATYWCC | CAGCAGBHCNHCAATYWCCCTCC | 3133 | 3595 |
| | CTCCTMTCACTTTTGGCGGAGGGACCAAG | TMTCACT | | |
| VK1-33_t2_2_10 | CCTGAAGATATTGCAACATATTACTGTCAGCAGBHCNHCAATYWCC | CAGCAGBHCNHCAATYWCCCTCC | 3134 | 3596 |
| | CTCCTWGGACTTTTGGCGGAGGGACCAAG | TWGGACT | | |
| VK1-33_t3_0_10 | CCTGAAGATATTGCAACATATTACTGTCAGCAGBHCGATNHCYWCC | CAGCAGBHCGATNHCYWCCCTCC | 3135 | 3597 |
| | CTCCTTWCACTTTTGGCGGAGGGACCAAG | TTWCACT | | |
| VK1-33_t3_1_10 | CCTGAAGATATTGCAACATATTACTGTCAGCAGBHCGATNHCYWCC | CAGCAGBHCGATNHCYWCCCTCC | 3136 | 3598 |
| | CTCCTMTCACTTTTGGCGGAGGGACCAAG | TMTCACT | | |
| VK1-33_t3_2_10 | CCTGAAGATATTGCAACATATTACTGTCAGCAGBHCGATNHCYWCC | CAGCAGBHCGATNHCYWCCCTCC | 3137 | 3599 |
| | CTCCTWGGACTTTTGGCGGAGGGACCAAG | TWGGACT | | |
| VK1-33_t4_0_10 | CCTGAAGATATTGCAACATATTACTGTCAGCAGTACNHCNHCYWCC | CAGCAGTACNHCNHCYWCCCTCC | 3138 | 3600 |
| | CTCCTTWCACTTTTGGCGGAGGGACCAAG | TTWCACT | | |
| VK1-33_t4_1_10 | CCTGAAGATATTGCAACATATTACTGTCAGCAGTACNHCNHCYWCC | CAGCAGTACNHCNHCYWCCCTCC | 3139 | 3601 |
| | CTCCTMTCACTTTTGGCGGAGGGACCAAG | TMTCACT | | |
| VK1-33_t4_2_10 | CCTGAAGATATTGCAACATATTACTGTCAGCAGTACNHCNHCYWCC | CAGCAGTACNHCNHCYWCCCTCC | 3140 | 3602 |
| | CTCCTWGGACTTTTGGCGGAGGGACCAAG | TWGGACT | | |
| VK1-39_t1_0_10 | CCTGAAGATTTTGCAACTTACTACTGTCAGCAAVNABHCNHCACTC | CAGCAAVNABHCNHCACTCCTCC | 3141 | 3603 |
| | CTCCTTWCACTTTTGGCGGAGGGACCAAG | TTWCACT | | |
| VK1-39_t1_1_10 | CCTGAAGATTTTGCAACTTACTACTGTCAGCAAVNABHCNHCACTC | CAGCAAVNABHCNHCACTCCTCC | 3142 | 3604 |
| | CTCCTMTCACTTTTGGCGGAGGGACCAAG | TMTCACT | | |
| VK1-39_t1_2_10 | CCTGAAGATTTTGCAACTTACTACTGTCAGCAAVNABHCNHCACTC | CAGCAAVNABHCNHCACTCCTCC | 3143 | 3605 |
| | CTCCTWGGACTTTTGGCGGAGGGACCAAG | TWGGACT | | |
| VK1-39_t2_0_10 | CCTGAAGATTTTGCAACTTACTACTGTCAGCAAVNABHCAGTBHCC | CAGCAAVNABHCAGTBHCCCTCC | 3144 | 3606 |
| | CTCCTTWCACTTTTGGCGGAGGGACCAAG | TTWCACT | | |
| VK1-39_t2_1_10 | CCTGAAGATTTTGCAACTTACTACTGTCAGCAAVNABHCAGTBHCC | CAGCAAVNABHCAGTBHCCCTCC | 3145 | 3607 |
| | CTCCTMTCACTTTTGGCGGAGGGACCAAG | TMTCACT | | |
| VK1-39_t2_2_10 | CCTGAAGATTTTGCAACTTACTACTGTCAGCAAVNABHCAGTBHCC | CAGCAAVNABHCAGTBHCCCTCC | 3146 | 3608 |
| | CTCCTWGGACTTTTGGCGGAGGGACCAAG | TWGGACT | | |
| VK1-39_t3_0_10 | CCTGAAGATTTTGCAACTTACTACTGTCAGCAAVNATACNHCBHCC | CAGCAAVNATACNHCBHCCCTCC | 3147 | 3609 |
| | CTCCTTWCACTTTTGGCGGAGGGACCAAG | TTWCACT | | |
| VK1-39_t3_1_10 | CCTGAAGATTTTGCAACTTACTACTGTCAGCAAVNATACNHCBHCC | CAGCAAVNATACNHCBHCCCTCC | 3148 | 3610 |
| | CTCCTMTCACTTTTGGCGGAGGGACCAAG | TMTCACT | | |
| VK1-39_t3_2_10 | CCTGAAGATTTTGCAACTTACTACTGTCAGCAAVNATACNHCBHCC | CAGCAAVNATACNHCBHCCCTCC | 3149 | 3611 |
| | CTCCTWGGACTTTTGGCGGAGGGACCAAG | TWGGACT | | |
| VK1-39_t4_0_10 | CCTGAAGATTTTGCAACTTACTACTGTCAGCAAAGCBHCNHCBHCC | CAGCAAAGCBHCNHCBHCCCTCC | 3150 | 3612 |
| | CTCCTTWCACTTTTGGCGGAGGGACCAAG | TTWCACT | | |
| VK1-39_t4_1_10 | CCTGAAGATTTTGCAACTTACTACTGTCAGCAAAGCBHCNHCBHCC | CAGCAAAGCBHCNHCBHCCCTCC | 3151 | 3613 |
| | CTCCTMTCACTTTTGGCGGAGGGACCAAG | TMTCACT | | |
| VK1-39_t4_2_10 | CCTGAAGATTTTGCAACTTACTACTGTCAGCAAAGCBHCNHCBHCC | CAGCAAAGCBHCNHCBHCCCTCC | 3152 | 3614 |
| | CTCCTWGGACTTTTGGCGGAGGGACCAAG | TWGGACT | | |
| VK2-28_t1_0_10 | GCTGAGGATGTTGGGGTTTATTACTGCATGCAGVNAMNASRMACTC | ATGCAGVNAMNASRMACTCCTCC | 3153 | 3615 |
| | CTCCTTWCACTTTTGGCGGAGGGACCAAG | TTWCACT | | |
| VK2-28_t1_1_10 | GCTGAGGATGTTGGGGTTTATTACTGCATGCAGVNAMNASRMACTC | ATGCAGVNAMNASRMACTCCTCC | 3154 | 3616 |
| | CTCCTMTCACTTTTGGCGGAGGGACCAAG | TMTCACT | | |
| VK2-28_t1_2_10 | GCTGAGGATGTTGGGGTTTATTACTGCATGCAGVNAMNASRMACTC | ATGCAGVNAMNASRMACTCCTCC | 3155 | 3617 |
| | CTCCTWGGACTTTTGGCGGAGGGACCAAG | TWGGACT | | |
| VK2-28_t2_0_10 | GCTGAGGATGTTGGGGTTTATTACTGCATGCAGVNAMNACAGVBCC | ATGCAGVNAMNACAGVBCCCTCC | 3156 | 3618 |
| | CTCCTTWCACTTTTGGCGGAGGGACCAAG | TTWCACT | | |
| VK2-28_t2_1_10 | GCTGAGGATGTTGGGGTTTATTACTGCATGCAGVNAMNACAGVBCC | ATGCAGVNAMNACAGVBCCCTCC | 3157 | 3619 |
| | CTCCTMTCACTTTTGGCGGAGGGACCAAG | TMTCACT | | |
| VK2-28_t2_2_10 | GCTGAGGATGTTGGGGTTTATTACTGCATGCAGVNAMNACAGVBCC | ATGCAGVNAMNACAGVBCCCTCC | 3158 | 3620 |
| | CTCCTWGGACTTTTGGCGGAGGGACCAAG | TWGGACT | | |
| VK2-28_t3_0_10 | GCTGAGGATGTTGGGGTTTATTACTGCATGCAGVNACTCSRMVBCC | ATGCAGVNACTCSRMVBCCCTCC | 3159 | 3621 |
| | CTCCTTWCACTTTTGGCGGAGGGACCAAG | TTWCACT | | |
| VK2-28_t3_1_10 | GCTGAGGATGTTGGGGTTTATTACTGCATGCAGVNACTCSRMVBCC | ATGCAGVNACTCSRMVBCCCTCC | 3160 | 3622 |
| | CTCCTMTCACTTTTGGCGGAGGGACCAAG | TMTCACT | | |
| VK2-28_t3_2_10 | GCTGAGGATGTTGGGGTTTATTACTGCATGCAGVNACTCSRMVBCC | ATGCAGVNACTCSRMVBCCCTCC | 3161 | 3623 |
| | CTCCTWGGACTTTTGGCGGAGGGACCAAG | TWGGACT | | |
| VK2-28_t4_0_10 | GCTGAGGATGTTGGGGTTTATTACTGCATGCAGGCAMNASRMVBCC | ATGCAGGCAMNASRMVBCCCTCC | 3162 | 3624 |
| | CTCCTTWCACTTTTGGCGGAGGGACCAAG | TTWCACT | | |
| VK2-28_t4_1_10 | GCTGAGGATGTTGGGGTTTATTACTGCATGCAGGCAMNASRMVBCC | ATGCAGGCAMNASRMVBCCCTCC | 3163 | 3625 |
| | CTCCTMTCACTTTTGGCGGAGGGACCAAG | TMTCACT | | |
| VK2-28_t4_2_10 | GCTGAGGATGTTGGGGTTTATTACTGCATGCAGGCAMNASRMVBCC | ATGCAGGCAMNASRMVBCCCTCC | 3164 | 3626 |
| | CTCCTWGGACTTTTGGCGGAGGGACCAAG | TWGGACT | | |
| VK3-11_t1_0_10 | CCTGAAGATTTTGCAGTTTATTACTGTCAGCAGBHCNHCNHCTGGC | CAGCAGBHCNHCNHCTGGCCTCC | 3165 | 3627 |
| | CTCCTTWCACTTTTGGCGGAGGGACCAAG | TTWCACT | | |
| VK3-11_t1_1_10 | CCTGAAGATTTTGCAGTTTATTACTGTCAGCAGBHCNHCNHCTGGC | CAGCAGBHCNHCNHCTGGCCTCC | 3166 | 3628 |
| | CTCCTMTCACTTTTGGCGGAGGGACCAAG | TMTCACT | | |
| VK3-11_t1_2_10 | CCTGAAGATTTTGCAGTTTATTACTGTCAGCAGBHCNHCNHCTGGC | CAGCAGBHCNHCNHCTGGCCTCC | 3167 | 3629 |
| | CTCCTWGGACTTTTGGCGGAGGGACCAAG | TWGGACT | | |
| VK3-11_t2_0_10 | CCTGAAGATTTTGCAGTTTATTACTGTCAGCAGBHCNHCAATYWCC | CAGCAGBHCNHCAATYWCCCTCC | 3168 | 3594 |
| | CTCCTTWCACTTTTGGCGGAGGGACCAAG | TTWCACT | | |
| VK3-11_t2_1_10 | CCTGAAGATTTTGCAGTTTATTACTGTCAGCAGBHCNHCAATYWCC | CAGCAGBHCNHCAATYWCCCTCC | 3169 | 3595 |
| | CTCCTMTCACTTTTGGCGGAGGGACCAAG | TMTCACT | | |
| VK3-11_t2_2_10 | CCTGAAGATTTTGCAGTTTATTACTGTCAGCAGBHCNHCAATYWCC | CAGCAGBHCNHCAATYWCCCTCC | 3170 | 3596 |
| | CTCCTWGGACTTTTGGCGGAGGGACCAAG | TWGGACT | | |
| VK3-11_t3_0_10 | CCTGAAGATTTTGCAGTTTATTACTGTCAGCAGBHCAGTNHCYWCC | CAGCAGBHCAGTNHCYWCCCTCC | 3171 | 3630 |
| | CTCCTTWCACTTTTGGCGGAGGGACCAAG | TTWCACT | | |
| VK3-11_t3_1_10 | CCTGAAGATTTTGCAGTTTATTACTGTCAGCAGBHCAGTNHCYWCC | CAGCAGBHCAGTNHCYWCCCTCC | 3172 | 3631 |
| | CTCCTMTCACTTTTGGCGGAGGGACCAAG | TMTCACT | | |
| VK3-11_t3_2_10 | CCTGAAGATTTTGCAGTTTATTACTGTCAGCAGBHCAGTNHCYWCC | CAGCAGBHCAGTNHCYWCCCTCC | 3173 | 3632 |
| | CTCCTWGGACTTTTGGCGGAGGGACCAAG | TWGGACT | | |
| VK3-11_t4_0_10 | CCTGAAGATTTTGCAGTTTATTACTGTCAGCAGAGANHCNHCYWCC | CAGCAGAGANHCNHCYWCCCTCC | 3174 | 3633 |
| | CTCCTTWCACTTTTGGCGGAGGGACCAAG | TTWCACT | | |
| VK3-11_t4_1_10 | CCTGAAGATTTTGCAGTTTATTACTGTCAGCAGAGANHCNHCYWCC | CAGCAGAGANHCNHCYWCCCTCC | 3175 | 3634 |
| | CTCCTMTCACTTTTGGCGGAGGGACCAAG | TMTCACT | | |
| VK3-11_t4_2_10 | CCTGAAGATTTTGCAGTTTATTACTGTCAGCAGAGANHCNHCYWCC | CAGCAGAGANHCNHCYWCCCTCC | 3176 | 3635 |
| | CTCCTWGGACTTTTGGCGGAGGGACCAAG | TWGGACT | | |
| VK3-15_t1_0_10 | CAGTCTGAAGATTTTGCAGTTTATTACTGTCAGCAGBHCNHCNHCT | CAGCAGBHCNHCNHCTGGCCTCC | 3177 | 3627 |
| | GGCCTCCTTWCACTTTTGGCGGAGGGACCAAG | TTWCACT | | |
| VK3-15_t1_1_10 | CAGTCTGAAGATTTTGCAGTTTATTACTGTCAGCAGBHCNHCNHCT | CAGCAGBHCNHCNHCTGGCCTCC | 3178 | 3628 |
| | GGCCTCCTMTCACTTTTGGCGGAGGGACCAAG | TMTCACT | | |
| VK3-15_t1_2_10 | CAGTCTGAAGATTTTGCAGTTTATTACTGTCAGCAGBHCNHCNHCT | CAGCAGBHCNHCNHCTGGCCTCC | 3179 | 3629 |
| | GGCCTCCTWGGACTTTTGGCGGAGGGACCAAG | TWGGACT | | |
| VK3-15_t2_0_10 | CAGTCTGAAGATTTTGCAGTTTATTACTGTCAGCAGBHCNHCAATY | CAGCAGBHCNHCAATYWCCCTCC | 3180 | 3594 |
| | WCCCTCCTTWCACTTTTGGCGGAGGGACCAAG | TTWCACT | | |
| VK3-15_t2_1_10 | CAGTCTGAAGATTTTGCAGTTTATTACTGTCAGCAGBHCNHCAATY | CAGCAGBHCNHCAATYWCCCTCC | 3181 | 3595 |
| | WCCCTCCTMTCACTTTTGGCGGAGGGACCAAG | TMTCACT | | |
| VK3-15_t2_2_10 | CAGTCTGAAGATTTTGCAGTTTATTACTGTCAGCAGBHCNHCAATY | CAGCAGBHCNHCAATYWCCCTCC | 3182 | 3596 |
| | WCCCTCCTWGGACTTTTGGCGGAGGGACCAAG | TWGGACT | | |
| VK3-15_t3_0_10 | CAGTCTGAAGATTTTGCAGTTTATTACTGTCAGCAGBHCAATNHCY | CAGCAGBHCAATNHCYWCCCTCC | 3183 | 3636 |
| | WCCCTCCTTWCACTTTTGGCGGAGGGACCAAG | TTWCACT | | |
| VK3-15_t3_1_10 | CAGTCTGAAGATTTTGCAGTTTATTACTGTCAGCAGBHCAATNHCY | CAGCAGBHCAATNHCYWCCCTCC | 3184 | 3637 |
| | WCCCTCCTMTCACTTTTGGCGGAGGGACCAAG | TMTCACT | | |
| VK3-15_t3_2_10 | CAGTCTGAAGATTTTGCAGTTTATTACTGTCAGCAGBHCAATNHCY | CAGCAGBHCAATNHCYWCCCTCC | 3185 | 3638 |
| | WCCCTCCTWGGACTTTTGGCGGAGGGACCAAG | TWGGACT | | |
| VK3-15_t4_0_10 | CAGTCTGAAGATTTTGCAGTTTATTACTGTCAGCAGTACNHCNHCY | CAGCAGTACNHCNHCYWCCCTCC | 3186 | 3600 |
| | WCCCTCCTTWCACTTTTGGCGGAGGGACCAAG | TTWCACT | | |
| VK3-15_t4_1_10 | CAGTCTGAAGATTTTGCAGTTTATTACTGTCAGCAGTACNHCNHCY | CAGCAGTACNHCNHCYWCCCTCC | 3187 | 3601 |
| | WCCCTCCTMTCACTTTTGGCGGAGGGACCAAG | TMTCACT | | |
| VK3-15_t4_2_10 | CAGTCTGAAGATTTTGCAGTTTATTACTGTCAGCAGTACNHCNHCY | CAGCAGTACNHCNHCYWCCCTCC | 3188 | 3602 |
| | WCCCTCCTWGGACTTTTGGCGGAGGGACCAAG | TWGGACT | | |
| VK3-20_t1_0_10 | CCTGAAGATTTTGCAGTGTATTACTGTCAGCAGBHCBHCVNCAGTC | CAGCAGBHCBHCVNCAGTCCTCC | 3189 | 3639 |
| | CTCCTTWCACTTTTGGCGGAGGGACCAAG | TTWCACT | | |
| VK3-20_t1_1_10 | CCTGAAGATTTTGCAGTGTATTACTGTCAGCAGBHCBHCVNCAGTC | CAGCAGBHCBHCVNCAGTCCTCC | 3190 | 3640 |
| | CTCCTMTCACTTTTGGCGGAGGGACCAAG | TMTCACT | | |
| VK3-20_t1_2_10 | CCTGAAGATTTTGCAGTGTATTACTGTCAGCAGBHCBHCVNCAGTC | CAGCAGBHCBHCVNCAGTCCTCC | 3191 | 3641 |
| | CTCCTWGGACTTTTGGCGGAGGGACCAAG | TWGGACT | | |
| VK3-20_t2_0_10 | CCTGAAGATTTTGCAGTGTATTACTGTCAGCAGBHCBHCAGTBHCC | CAGCAGBHCBHCAGTBHCCCTCC | 3192 | 3642 |
| | CTCCTTWCACTTTTGGCGGAGGGACCAAG | TTWCACT | | |
| VK3-20_t2_1_10 | CCTGAAGATTTTGCAGTGTATTACTGTCAGCAGBHCBHCAGTBHCC | CAGCAGBHCBHCAGTBHCCCTCC | 3193 | 3643 |
| | CTCCTMTCACTTTTGGCGGAGGGACCAAG | TMTCACT | | |
| VK3-20_t2_2_10 | CCTGAAGATTTTGCAGTGTATTACTGTCAGCAGBHCBHCAGTBHCC | CAGCAGBHCBHCAGTBHCCCTCC | 3194 | 3644 |
| | CTCCTWGGACTTTTGGCGGAGGGACCAAG | TWGGACT | | |
| VK3-20_t3_0_10 | CCTGAAGATTTTGCAGTGTATTACTGTCAGCAGBHCGGAVNCBHCC | CAGCAGBHCGGAVNCBHCCCTCC | 3195 | 3645 |
| | CTCCTTWCACTTTTGGCGGAGGGACCAAG | TTWCACT | | |
| VK3-20_t3_1_10 | CCTGAAGATTTTGCAGTGTATTACTGTCAGCAGBHCGGAVNCBHCC | CAGCAGBHCGGAVNCBHCCCTCC | 3196 | 3646 |
| | CTCCTMTCACTTTTGGCGGAGGGACCAAG | TMTCACT | | |
| VK3-20_t3_2_10 | CCTGAAGATTTTGCAGTGTATTACTGTCAGCAGBHCGGAVNCBHCC | CAGCAGBHCGGAVNCBHCCCTCC | 3197 | 3647 |
| | CTCCTWGGACTTTTGGCGGAGGGACCAAG | TWGGACT | | |
| VK3-20_t4_0_10 | CCTGAAGATTTTGCAGTGTATTACTGTCAGCAGTACBHCVNCBHCC | CAGCAGTACBHCVNCBHCCCTCC | 3198 | 3648 |
| | CTCCTTWCACTTTTGGCGGAGGGACCAAG | TTWCACT | | |
| VK3-20_t4_1_10 | CCTGAAGATTTTGCAGTGTATTACTGTCAGCAGTACBHCVNCBHCC | CAGCAGTACBHCVNCBHCCCTCC | 3199 | 3649 |
| | CTCCTMTCACTTTTGGCGGAGGGACCAAG | TMTCACT | | |
| VK3-20_t4_2_10 | CCTGAAGATTTTGCAGTGTATTACTGTCAGCAGTACBHCVNCBHCC | CAGCAGTACBHCVNCBHCCCTCC | 3200 | 3650 |
| | CTCCTWGGACTTTTGGCGGAGGGACCAAG | TWGGACT | | |
| VK4-01_t1_0_10 | GCTGAAGATGTGGCAGTTTATTACTGTCAGCAGBHCBHCNHCACTC | CAGCAGBHCBHCNHCACTCCTCC | 3201 | 3651 |
| | CTCCTTWCACTTTTGGCGGAGGGACCAAG | TTWCACT | | |
| VK4-01_t1_1_10 | GCTGAAGATGTGGCAGTTTATTACTGTCAGCAGBHCBHCNHCACTC | CAGCAGBHCBHCNHCACTCCTCC | 3202 | 3652 |
| | CTCCTMTCACTTTTGGCGGAGGGACCAAG | TMTCACT | | |
| VK4-01_t1_2_10 | GCTGAAGATGTGGCAGTTTATTACTGTCAGCAGBHCBHCNHCACTC | CAGCAGBHCBHCNHCACTCCTCC | 3203 | 3653 |
| | CTCCTWGGACTTTTGGCGGAGGGACCAAG | TWGGACT | | |
| VK4-01_t2_0_10 | GCTGAAGATGTGGCAGTTTATTACTGTCAGCAGBHCBHCAGTBHCC | CAGCAGBHCBHCAGTBHCCCTCC | 3204 | 3642 |
| | CTCCTTWCACTTTTGGCGGAGGGACCAAG | TTWCACT | | |
| VK4-01_t2_1_10 | GCTGAAGATGTGGCAGTTTATTACTGTCAGCAGBHCBHCAGTBHCC | CAGCAGBHCBHCAGTBHCCCTCC | 3205 | 3643 |
| | CTCCTMTCACTTTTGGCGGAGGGACCAAG | TMTCACT | | |
| VK4-01_t2_2_10 | GCTGAAGATGTGGCAGTTTATTACTGTCAGCAGBHCBHCAGTBHCC | CAGCAGBHCBHCAGTBHCCCTCC | 3206 | 3644 |
| | CTCCTWGGACTTTTGGCGGAGGGACCAAG | TWGGACT | | |
| VK4-01_t3_0_10 | GCTGAAGATGTGGCAGTTTATTACTGTCAGCAGBHCTACNHCBHCC | CAGCAGBHCTACNHCBHCCCTCC | 3207 | 3654 |
| | CTCCTTWCACTTTTGGCGGAGGGACCAAG | TTWCACT | | |
| VK4-01_t3_1_10 | GCTGAAGATGTGGCAGTTTATTACTGTCAGCAGBHCTACNHCBHCC | CAGCAGBHCTACNHCBHCCCTCC | 3208 | 3655 |
| | CTCCTMTCACTTTTGGCGGAGGGACCAAG | TMTCACT | | |
| VK4-01_t3_2_10 | GCTGAAGATGTGGCAGTTTATTACTGTCAGCAGBHCTACNHCBHCC | CAGCAGBHCTACNHCBHCCCTCC | 3209 | 3656 |
| | CTCCTWGGACTTTTGGCGGAGGGACCAAG | TWGGACT | | |
| VK4-01_t4_0_10 | GCTGAAGATGTGGCAGTTTATTACTGTCAGCAGTACBHCNHCBHCC | CAGCAGTACBHCNHCBHCCCTCC | 3210 | 3657 |
| | CTCCTTWCACTTTTGGCGGAGGGACCAAG | TTWCACT | | |
| VK4-01_t4_1_10 | GCTGAAGATGTGGCAGTTTATTACTGTCAGCAGTACBHCNHCBHCC | CAGCAGTACBHCNHCBHCCCTCC | 3211 | 3658 |
| | CTCCTMTCACTTTTGGCGGAGGGACCAAG | TMTCACT | | |
| VK4-01_t4_2_10 | GCTGAAGATGTGGCAGTTTATTACTGTCAGCAGTACBHCNHCBHCC | CAGCAGTACBHCNHCBHCCCTCC | 3212 | 3659 |
| | CTCCTWGGACTTTTGGCGGAGGGACCAAG | TWGGACT | | |

TABLE 8
Number of unique CDRL3 amino acid sequences in exemplary jumping dimer (“JD”) and
jumping trimer (“JT”) VK libraries and comparison to VK-v1.0.

| | | |
|---|---|---|
| L = 8 aa | L = 9 aa | L = 10 aa |

Jumping Dimer

| Germline | JD | VK-v1.0 | JD | VK-v1.0 | JD | VK-v1.0 |
|---|---|---|---|---|---|---|
| VK1-05 | 3549 | 3072 | 7098 | 6144 | 6084 | 13824 |
| VK1-12 | 5250 | 2016 | 5250 | 2016 | 4500 | 5184 |
| VK1-33 | 5502 | 4032 | 5502 | 4032 | 4716 | 10368 |
| VK1-39 | 7224 | 3024 | 7224 | 3024 | 6192 | 7776 |
| VK2-28 | 4396 | 2016 | 4396 | 2016 | 3768 | 5184 |
| VK3-11 | 6048 | 2352 | 6048 | 2016 | 5184 | 6048 |
| VK3-15 | 5789 | 2016 | 5789 | 2352 | 4962 | 5184 |
| VK3-20 | 6405 | 2016 | 6671 | 2016 | 5490 | 5184 |
| VK4-01 | NPE* | 2016 | 6405 | 2592 | NPE* | 5184 |
| Total | 4.42 * 10⁴ | 2.26 * 10⁴ | 5.44 * 10⁴ | 2.62 * 10⁴ | 4.09 * 10⁴ | 6.39 * 10⁴ |

Jumping Trimer

| Germline | JT | VK-v1.0 | JT | VK-v1.0 | JT | VK-v1.0 |
|---|---|---|---|---|---|---|
| VK1-05 | 7872 | 3072 | 13776 | 6144 | 11808 | 13824 |
| VK1-12 | 14469 | 2016 | 14469 | 2016 | 12402 | 5184 |
| VK1-33 | 15960 | 4032 | 15960 | 4032 | 13680 | 10368 |
| VK1-39 | 28980 | 3024 | 28980 | 3024 | 24840 | 7776 |
| VK2-28 | 12306 | 2016 | 12306 | 2016 | 10548 | 5184 |
| VK3-11 | 18900 | 2352 | 18900 | 2016 | 16200 | 6048 |
| VK3-15 | 18256 | 2016 | 18256 | 2352 | 15648 | 5184 |
| VK3-20 | 23688 | 2016 | 23688 | 2016 | 20304 | 5184 |
| VK4-01 | 23688 | 2016 | 23688 | 2592 | 20304 | 5184 |
| Total | 1.64 * 10⁵ | 2.26 * 10⁴ | 1.70 * 10⁵ | 2.62 * 10⁴ | 1.46 * 10⁵ | 6.39 * 10⁴ |

*Not Presently Exemplified. However, given the teachings of the specification, a person of ordinary skill in the art could readily produce a library of such lengths, and these lengths are included within the scope of the invention.

TABLE 9
Matching output for exemplary CDRH3 sequences from the HPS and TSP1.
Amino acid mismatches in the theoretical design are indicated in bold.

| Test | CDRH3 Sequence | SEQ | | | SEQ | | SEQ | | | SEQ |
|---|---|---|---|---|---|---|---|---|---|---|
| Case | from HPS | ID NO | Mismatches | TN1 | ID NO | DH | ID NO | N2 | H3-JH | ID NO |
| 1 | RTAHHFDY | 3660 | 0 | R | | TA | | H | HFDY | 4582 |
| 2.1 | VGIVGAASY | 3661 | 0 | V | | GIVGA | 3751 | AS | Y | |
| 2.2 | VGIVGAASY | 3661 | 0 | VG | | IVGA | 3755 | AS | Y | |
| 3.1 | DRYSGHDLGY | 3662 | 1 | DR | | YSGYD | 4389 | LG | Y | |
| 4.1 | GIAAADSNWLDP | 3663 | 1 | — | | GIAAA | 4448 | D | SNWFDP | 4600 |
| 4.2 | GIAAADSNWLDP | 3663 | 1 | — | | IAAA | 4452 | D | SNWFDP | 4600 |
| 5.1 | ERTINWGWGGVYAFDI | 3664 | 3 | EGTG | 3707 | NWG | | GGV | YAFDI | 4540 |
| 5.2 | ERTINWGWGGVYAFDI | 3663 | 3 | EGTG | 3707 | NWG | | WGT | YAFDI | 4540 |
| 5.3 | ERTINWGWGGVYAFDI | 3664 | 3 | ERGG | 3719 | NWG | | GGV | YAFDI | 4540 |
| 5.4 | ERTINWGWGGVYAFDI | 3664 | 3 | ERGG | 3719 | NWG | | WGT | YAFDI | 4540 |

TABLE 10
Theoretical segment pool of 212 TN1 sequences
contained in Theoretical Segment Pool 1 (TSP1).

| TN1 | Amino | TN1 | Amino | |
|---|---|---|---|---|
| Segment | Acid | Segment | Acid | SEQ |
| Name | Sequence | Name | Sequence | ID NO |
| P000 | — | P107 | PT | n/a |
| P001 | E | P108 | EPT | n/a |
| P002 | D | P109 | DPT | n/a |
| P003 | G | P110 | GPT | n/a |
| P004 | EG | P111 | PV | n/a |
| P005 | DG | P112 | EPV | n/a |
| P006 | GG | P113 | DPV | n/a |
| P007 | R | P114 | GPV | n/a |
| P008 | ER | P115 | RP | n/a |
| P009 | DR | P116 | ERP | n/a |
| P010 | GR | P117 | DRP | n/a |
| P011 | S | P118 | GRP | n/a |
| P012 | ES | P119 | SP | n/a |
| P013 | DS | P120 | ESP | n/a |
| P014 | GS | P121 | DSP | n/a |
| P015 | P | P122 | GSP | n/a |
| P016 | EP | P123 | LP | n/a |
| P017 | DP | P124 | ELP | n/a |
| P018 | GP | P125 | DLP | n/a |
| P019 | L | P126 | GLP | n/a |
| P020 | EL | P127 | AP | n/a |
| P021 | DL | P128 | EAP | n/a |
| P022 | GL | P129 | DAP | n/a |
| P023 | A | P130 | GAP | n/a |
| P024 | EA | P131 | TP | n/a |
| P025 | DA | P132 | ETP | n/a |
| P026 | GA | P133 | DTP | n/a |
| P027 | T | P134 | GTP | n/a |
| P028 | ET | P135 | VP | n/a |
| P029 | DT | P136 | EVP | n/a |
| P030 | GT | P137 | DVP | n/a |
| P031 | V | P138 | GVP | n/a |
| P032 | EV | P139 | AGG | n/a |
| P033 | DV | P140 | EAGG | 3665 |
| P034 | GV | P141 | DAGG | 3666 |
| P035 | EGG | P142 | GAGG | 3667 |
| P036 | DGG | P143 | EGAG | 3668 |
| P037 | GGG | P144 | DGAG | 3669 |
| P038 | EGR | P145 | GGAG | 3670 |
| P039 | DGR | P146 | EGGA | 3671 |
| P040 | GGR | P147 | DGGA | 3672 |
| P041 | EGS | P148 | GGGA | 3673 |
| P042 | DGS | P149 | EGGG | 3674 |
| P043 | GGS | P150 | DGGG | 3675 |
| P044 | EGP | P151 | GGGG | 3676 |
| P045 | DGP | P152 | EGGL | 3677 |
| P046 | GGP | P153 | DGGL | 3678 |
| P047 | EGL | P154 | GGGL | 3679 |
| P048 | DGL | P155 | EGGP | 3680 |
| P049 | GGL | P156 | DGGP | 3681 |
| P050 | EGA | P157 | GGGP | 3682 |
| P051 | DGA | P158 | EGGR | 3683 |
| P052 | GGA | P159 | DGGR | 3684 |
| P053 | EGT | P160 | GGGR | 3685 |
| P054 | DGT | P161 | EGGS | 3686 |
| P055 | GGT | P162 | DGGS | 3687 |
| P056 | EGV | P163 | GGGS | 3688 |
| P057 | DGV | P164 | EGGT | 3689 |
| P058 | GGV | P165 | DGGT | 3690 |
| P059 | RG | P166 | GGGT | 3691 |
| P060 | ERG | P167 | EGGV | 3692 |
| P061 | DRG | P168 | DGGV | 3693 |
| P062 | GRG | P169 | GGGV | 3694 |
| P063 | SG | P170 | EGLG | 3695 |
| P064 | ESG | P171 | DGLG | 3696 |
| P065 | DSG | P172 | GGLG | 3697 |
| P066 | GSG | P173 | EGPG | 3698 |
| P067 | PG | P174 | DGPG | 3699 |
| P068 | EPG | P175 | GGPG | 3700 |
| P069 | DPG | P176 | EGRG | 3701 |
| P070 | GPG | P177 | DGRG | 3702 |
| P071 | LG | P178 | GGRG | 3703 |
| P072 | ELG | P179 | EGSG | 3704 |
| P073 | DLG | P180 | DGSG | 3705 |
| P074 | GLG | P181 | GGSG | 3706 |
| P075 | AG | P182 | EGTG | 3707 |
| P076 | EAG | P183 | DGTG | 3708 |
| P077 | DAG | P184 | GGTG | 3709 |
| P078 | GAG | P185 | EGVG | 3710 |
| P079 | TG | P186 | DGVG | 3711 |
| P080 | ETG | P187 | GGVG | 3712 |
| P081 | DTG | P188 | LGG | n/a |
| P082 | GTG | P189 | ELGG | 3713 |
| P083 | VG | P190 | DLGG | 3714 |
| P084 | EVG | P191 | GLGG | 3715 |
| P085 | DVG | P192 | PGG | n/a |
| P086 | GVG | P193 | EPGG | 3716 |
| P087 | PR | P194 | DPGG | 3717 |
| P088 | EPR | P195 | GPGG | 3718 |
| P089 | DPR | P196 | RGG | n/a |
| P090 | GPR | P197 | ERGG | 3719 |
| P091 | PS | P198 | DRGG | 3720 |
| P092 | EPS | P199 | GRGG | 3721 |
| P093 | DPS | P200 | SGG | n/a |
| P094 | GPS | P201 | ESGG | 3722 |
| P095 | PP | P202 | DSGG | 3723 |
| P096 | EPP | P203 | GSGG | 3724 |
| P097 | DPP | P204 | TGG | n/a |
| P098 | GPP | P205 | ETGG | 3725 |
| P099 | PL | P206 | DTGG | 3726 |
| P100 | EPL | P207 | GTGG | 3727 |
| P101 | DPL | P208 | VGG | n/a |
| P102 | GPL | P209 | EVGG | 3728 |
| P103 | PA | P210 | DVGG | 3729 |
| P104 | EPA | P211 | GVGG | 3730 |
| P105 | DPA | | | |
| P106 | GPA | | | |

TABLE 11
1K DH Theoretical Segment Pool
sequences (1,111 DH segments).

| DH Segment | Amino Acid | SEQ |
|---|---|---|
| Name | Sequence | ID NO |
| DHUNIV_001 | GTTGTT | 3731 |
| DHUNIV_002 | GTTGT | 3732 |
| DHUNIV_003 | TTGTT | 3733 |
| DHUNIV_004 | GTTG | 3734 |
| DHUNIV_005 | TTGT | 3735 |
| DHUNIV_006 | TGTT | 3736 |
| DHUNIV_007 | GTT | n/a |
| DHUNIV_008 | TTG | n/a |
| DHUNIV_009 | TGT | n/a |
| DHUNIV_010 | GT | n/a |
| DHUNIV_011 | TT | n/a |
| DHUNIV_012 | TG | n/a |
| DHUNIV_013 | VQLER | 3737 |
| DHUNIV_014 | VQLE | 3738 |
| DHUNIV_015 | QLER | 3739 |
| DHUNIV_016 | VQL | n/a |
| DHUNIV_017 | QLE | n/a |
| DHUNIV_018 | LER | n/a |
| DHUNIV_019 | VQ | n/a |
| DHUNIV_020 | QL | n/a |
| DHUNIV_021 | LE | n/a |
| DHUNIV_022 | ER | n/a |
| DHUNIV_023 | YNWND | 3740 |
| DHUNIV_024 | YNWN | 3741 |
| DHUNIV_025 | NWND | 3742 |
| DHUNIV_026 | YNW | n/a |
| DHUNIV_027 | NWN | n/a |
| DHUNIV_028 | WND | n/a |
| DHUNIV_029 | YN | n/a |
| DHUNIV_030 | NW | n/a |
| DHUNIV_031 | WN | n/a |
| DHUNIV_032 | ND | n/a |
| DHUNIV_033 | GITGTT | 3743 |
| DHUNIV_034 | GITGT | 3744 |
| DHUNIV_035 | ITGTT | 3745 |
| DHUNIV_036 | GITG | 3746 |
| DHUNIV_037 | ITGT | 3747 |
| DHUNIV_038 | GIT | n/a |
| DHUNIV_039 | ITG | n/a |
| DHUNIV_040 | GI | n/a |
| DHUNIV_041 | IT | n/a |
| DHUNIV_042 | GIVGATT | 3748 |
| DHUNIV_043 | GIVGAT | 3749 |
| DHUNIV_044 | IVGATT | 3750 |
| DHUNIV_045 | GIVGA | 3751 |
| DHUNIV_046 | IVGAT | 3752 |
| DHUNIV_047 | VGATT | 3753 |
| DHUNIV_048 | GIVG | 3754 |
| DHUNIV_049 | IVGA | 3755 |
| DHUNIV_050 | VGAT | 3756 |
| DHUNIV_051 | GATT | 3757 |
| DHUNIV_052 | GIV | n/a |
| DHUNIV_053 | IVG | n/a |
| DHUNIV_054 | VGA | n/a |
| DHUNIV_055 | GAT | n/a |
| DHUNIV_056 | ATT | n/a |
| DHUNIV_057 | IV | n/a |
| DHUNIV_058 | VG | n/a |
| DHUNIV_059 | GA | n/a |
| DHUNIV_060 | AT | n/a |
| DHUNIV_061 | WELL | 3758 |
| DHUNIV_062 | WEL | n/a |
| DHUNIV_063 | ELL | n/a |
| DHUNIV_064 | WE | n/a |
| DHUNIV_065 | EL | n/a |
| DHUNIV_066 | LL | n/a |
| DHUNIV_067 | YSGSYY | 3759 |
| DHUNIV_068 | YSGSY | 3760 |
| DHUNIV_069 | SGSYY | 3761 |
| DHUNIV_070 | YSGS | 3762 |
| DHUNIV_071 | SGSY | 3763 |
| DHUNIV_072 | GSYY | 3764 |
| DHUNIV_073 | YSG | n/a |
| DHUNIV_074 | SGS | n/a |
| DHUNIV_075 | GSY | n/a |
| DHUNIV_076 | SYY | n/a |
| DHUNIV_077 | YS | n/a |
| DHUNIV_078 | SG | n/a |
| DHUNIV_079 | GS | n/a |
| DHUNIV_080 | SY | n/a |
| DHUNIV_081 | YY | n/a |
| DHUNIV_082 | LEL | n/a |
| DHUNIV_083 | YNWNY | 3765 |
| DHUNIV_084 | NWNY | 3766 |
| DHUNIV_085 | WNY | n/a |
| DHUNIV_086 | NY | n/a |
| DHUNIV_087 | RIL | n/a |
| DHUNIV_088 | LLL | n/a |
| DHUNIV_089 | RI | n/a |
| DHUNIV_090 | IL | n/a |
| DHUNIV_091 | WW | n/a |
| DHUNIV_092 | GYCSGGSCYS | 3767 |
| DHUNIV_093 | GYCSGGSCY | 3768 |
| DHUNIV_094 | YCSGGSCYS | 3769 |
| DHUNIV_095 | GYCSGGSC | 3770 |
| DHUNIV_096 | YCSGGSCY | 3771 |
| DHUNIV_097 | CSGGSCYS | 3772 |
| DHUNIV_098 | YCSGGSC | 3773 |
| DHUNIV_099 | CSGGSCY | 3774 |
| DHUNIV_100 | CSGGSC | 3775 |
| DHUNIV_101 | SGGS | 3776 |
| DHUNIV_102 | SGG | n/a |
| DHUNIV_103 | GGS | n/a |
| DHUNIV_104 | GY | n/a |
| DHUNIV_105 | GG | n/a |
| DHUNIV_106 | DIVVVVAATP | 3777 |
| DHUNIV_107 | DIVVVVAAT | 3778 |
| DHUNIV_108 | IVVVVAATP | 3779 |
| DHUNIV_109 | DIVVVVAA | 3780 |
| DHUNIV_110 | IVVVVAAT | 3781 |
| DHUNIV_111 | VVVVAATP | 3782 |
| DHUNIV_112 | DIVVVVA | 3783 |
| DHUNIV_113 | IVVVVAA | 3784 |
| DHUNIV_114 | VVVVAAT | 3785 |
| DHUNIV_115 | VVVAATP | 3786 |
| DHUNIV_116 | DIVVVV | 3787 |
| DHUNIV_117 | IVVVVA | 3788 |
| DHUNIV_118 | VVVVAA | 3789 |
| DHUNIV_119 | VVVAAT | 3790 |
| DHUNIV_120 | VVAATP | 3791 |
| DHUNIV_121 | DIVVV | 3792 |
| DHUNIV_122 | IVVVV | 3793 |
| DHUNIV_123 | VVVVA | 3794 |
| DHUNIV_124 | VVVAA | 3795 |
| DHUNIV_125 | VVAAT | 3796 |
| DHUNIV_126 | VAATP | 3797 |
| DHUNIV_127 | DIVV | 3798 |
| DHUNIV_128 | IVVV | 3799 |
| DHUNIV_129 | VVVV | 3800 |
| DHUNIV_130 | VVVA | 3801 |
| DHUNIV_131 | VVAA | 3802 |
| DHUNIV_132 | VAAT | 3803 |
| DHUNIV_133 | AATP | 3804 |
| DHUNIV_134 | DIV | n/a |
| DHUNIV_135 | IVV | n/a |
| DHUNIV_136 | VVV | n/a |
| DHUNIV_137 | VVA | n/a |
| DHUNIV_138 | VAA | n/a |
| DHUNIV_139 | AAT | n/a |
| DHUNIV_140 | ATP | n/a |
| DHUNIV_141 | DI | n/a |
| DHUNIV_142 | VV | n/a |
| DHUNIV_143 | VA | n/a |
| DHUNIV_144 | AA | n/a |
| DHUNIV_145 | TP | n/a |
| DHUNIV_146 | YQLL | 3805 |
| DHUNIV_147 | YQL | n/a |
| DHUNIV_148 | QLL | n/a |
| DHUNIV_149 | YQ | n/a |
| DHUNIV_150 | GYCSSTSCYA | 3806 |
| DHUNIV_151 | GYCSSTSCY | 3807 |
| DHUNIV_152 | YCSSTSCYA | 3808 |
| DHUNIV_153 | GYCSSTSC | 3809 |
| DHUNIV_154 | YCSSTSCY | 3810 |
| DHUNIV_155 | CSSTSCYA | 3811 |
| DHUNIV_156 | YCSSTSC | 3812 |
| DHUNIV_157 | CSSTSCY | 3813 |
| DHUNIV_158 | CSSTSC | 3814 |
| DHUNIV_159 | SSTS | 3815 |
| DHUNIV_160 | SST | n/a |
| DHUNIV_161 | STS | n/a |
| DHUNIV_162 | SS | n/a |
| DHUNIV_163 | ST | n/a |
| DHUNIV_164 | TS | n/a |
| DHUNIV_165 | YA | n/a |
| DHUNIV_166 | DIVVVPAAMP | 3816 |
| DHUNIV_167 | DIVVVPAAM | 3817 |
| DHUNIV_168 | IVVVPAAMP | 3818 |
| DHUNIV_169 | DIVVVPAA | 3819 |
| DHUNIV_170 | IVVVPAAM | 3820 |
| DHUNIV_171 | VVVPAAMP | 3821 |
| DHUNIV_172 | DIVVVPA | 3822 |
| DHUNIV_173 | IVVVPAA | 3823 |
| DHUNIV_174 | VVVPAAM | 3824 |
| DHUNIV_175 | VVPAAMP | 3825 |
| DHUNIV_176 | DIVVVP | 3826 |
| DHUNIV_177 | IVVVPA | 3827 |
| DHUNIV_178 | VVVPAA | 3828 |
| DHUNIV_179 | VVPAAM | 3829 |
| DHUNIV_180 | VPAAMP | 3830 |
| DHUNIV_181 | IVVVP | 3831 |
| DHUNIV_182 | VVVPA | 3832 |
| DHUNIV_183 | VVPAA | 3833 |
| DHUNIV_184 | VPAAM | 3834 |
| DHUNIV_185 | PAAMP | 3835 |
| DHUNIV_186 | VVVP | 3836 |
| DHUNIV_187 | VVPA | 3837 |
| DHUNIV_188 | VPAA | 3838 |
| DHUNIV_189 | PAAM | 3839 |
| DHUNIV_190 | AAMP | 3840 |
| DHUNIV_191 | VVP | n/a |
| DHUNIV_192 | VPA | n/a |
| DHUNIV_193 | PAA | n/a |
| DHUNIV_194 | AAM | n/a |
| DHUNIV_195 | AMP | n/a |
| DHUNIV_196 | VP | n/a |
| DHUNIV_197 | PA | n/a |
| DHUNIV_198 | AM | n/a |
| DHUNIV_199 | MP | n/a |
| DHUNIV_200 | YQLLY | 3841 |
| DHUNIV_201 | QLLY | 3842 |
| DHUNIV_202 | LLY | n/a |
| DHUNIV_203 | LY | n/a |
| DHUNIV_204 | GYCSSTSCYT | 3843 |
| DHUNIV_205 | YCSSTSCYT | 3844 |
| DHUNIV_206 | CSSTSCYT | 3845 |
| DHUNIV_207 | YT | n/a |
| DHUNIV_208 | DIVVVPAAIP | 3846 |
| DHUNIV_209 | DIVVVPAAI | 3847 |
| DHUNIV_210 | IVVVPAAIP | 3848 |
| DHUNIV_211 | IVVVPAAI | 3849 |
| DHUNIV_212 | VVVPAAIP | 3850 |
| DHUNIV_213 | VVVPAAI | 3851 |
| DHUNIV_214 | VVPAAIP | 3852 |
| DHUNIV_215 | VVPAAI | 3853 |
| DHUNIV_216 | VPAAIP | 3854 |
| DHUNIV_217 | VPAAI | 3855 |
| DHUNIV_218 | PAAIP | 3856 |
| DHUNIV_219 | PAAI | 3857 |
| DHUNIV_220 | AAIP | 3858 |
| DHUNIV_221 | AAI | n/a |
| DHUNIV_222 | AIP | n/a |
| DHUNIV_223 | AI | n/a |
| DHUNIV_224 | IP | n/a |
| DHUNIV_225 | WIL | n/a |
| DHUNIV_226 | WI | n/a |
| DHUNIV_227 | SILWW | 3859 |
| DHUNIV_228 | SILW | 3860 |
| DHUNIV_229 | ILWW | 3861 |
| DHUNIV_230 | SIL | n/a |
| DHUNIV_231 | ILW | n/a |
| DHUNIV_232 | LWW | n/a |
| DHUNIV_233 | LLF | n/a |
| DHUNIV_234 | SI | n/a |
| DHUNIV_235 | LW | n/a |
| DHUNIV_236 | LF | n/a |
| DHUNIV_237 | AYCGGDCYS | 3862 |
| DHUNIV_238 | AYCGGDCY | 3863 |
| DHUNIV_239 | YCGGDCYS | 3864 |
| DHUNIV_240 | AYCGGDC | 3865 |
| DHUNIV_241 | YCGGDCY | 3866 |
| DHUNIV_242 | CGGDCYS | 3867 |
| DHUNIV_243 | YCGGDC | 3868 |
| DHUNIV_244 | CGGDCY | 3869 |
| DHUNIV_245 | CGGDC | 3870 |
| DHUNIV_246 | GGD | n/a |
| DHUNIV_247 | AY | n/a |
| DHUNIV_248 | GD | n/a |
| DHUNIV_249 | HIVVVIAIP | 3871 |
| DHUNIV_250 | HIVVVIAI | 3872 |
| DHUNIV_251 | IVVVIAIP | 3873 |
| DHUNIV_252 | HIVVVIA | 3874 |
| DHUNIV_253 | IVVVIAI | 3875 |
| DHUNIV_254 | VVVIAIP | 3876 |
| DHUNIV_255 | HIVVVI | 3877 |
| DHUNIV_256 | IVVVIA | 3878 |
| DHUNIV_257 | VVVIAI | 3879 |
| DHUNIV_258 | VVIAIP | 3880 |
| DHUNIV_259 | HIVVV | 3881 |
| DHUNIV_260 | IVVVI | 3882 |
| DHUNIV_261 | VVVIA | 3883 |
| DHUNIV_262 | VVIAI | 3884 |
| DHUNIV_263 | VIAIP | 3885 |
| DHUNIV_264 | HIVV | 3886 |
| DHUNIV_265 | VVVI | 3887 |
| DHUNIV_266 | VVIA | 3888 |
| DHUNIV_267 | VIAI | 3889 |
| DHUNIV_268 | IAIP | 3890 |
| DHUNIV_269 | HIV | n/a |
| DHUNIV_270 | VVI | n/a |
| DHUNIV_271 | VIA | n/a |
| DHUNIV_272 | IAI | n/a |
| DHUNIV_273 | HI | n/a |
| DHUNIV_274 | VI | n/a |
| DHUNIV_275 | IA | n/a |
| DHUNIV_276 | HIVVVTAIP | 3891 |
| DHUNIV_277 | HIVVVTAI | 3892 |
| DHUNIV_278 | IVVVTAIP | 3893 |
| DHUNIV_279 | HIVVVTA | 3894 |
| DHUNIV_280 | IVVVTAI | 3895 |
| DHUNIV_281 | VVVTAIP | 3896 |
| DHUNIV_282 | HIVVVT | 3897 |
| DHUNIV_283 | IVVVTA | 3898 |
| DHUNIV_284 | VVVTAI | 3899 |
| DHUNIV_285 | VVTAIP | 3900 |
| DHUNIV_286 | IVVVT | 3901 |
| DHUNIV_287 | VVVTA | 3902 |
| DHUNIV_288 | VVTAI | 3903 |
| DHUNIV_289 | VTAIP | 3904 |
| DHUNIV_290 | VVVT | 3905 |
| DHUNIV_291 | VVTA | 3906 |
| DHUNIV_292 | VTAI | 3907 |
| DHUNIV_293 | TAIP | 3908 |
| DHUNIV_294 | VVT | n/a |
| DHUNIV_295 | VTA | n/a |
| DHUNIV_296 | TAI | n/a |
| DHUNIV_297 | VT | n/a |
| DHUNIV_298 | TA | n/a |
| DHUNIV_299 | RILY | 3909 |
| DHUNIV_300 | ILY | n/a |
| DHUNIV_301 | MLY | n/a |
| DHUNIV_302 | ML | n/a |
| DHUNIV_303 | GYCTNGVCYT | 3910 |
| DHUNIV_304 | GYCTNGVCY | 3911 |
| DHUNIV_305 | YCTNGVCYT | 3912 |
| DHUNIV_306 | GYCTNGVC | 3913 |
| DHUNIV_307 | YCTNGVCY | 3914 |
| DHUNIV_308 | CTNGVCYT | 3915 |
| DHUNIV_309 | YCTNGVC | 3916 |
| DHUNIV_310 | CTNGVCY | 3917 |
| DHUNIV_311 | CTNGVC | 3918 |
| DHUNIV_312 | TNGV | 3919 |
| DHUNIV_313 | TNG | n/a |
| DHUNIV_314 | NGV | n/a |
| DHUNIV_315 | TN | n/a |
| DHUNIV_316 | NG | n/a |
| DHUNIV_317 | GV | n/a |
| DHUNIV_318 | DIVLMVYAIP | 3920 |
| DHUNIV_319 | DIVLMVYAI | 3921 |
| DHUNIV_320 | IVLMVYAIP | 3922 |
| DHUNIV_321 | DIVLMVYA | 3923 |
| DHUNIV_322 | IVLMVYAI | 3924 |
| DHUNIV_323 | VLMVYAIP | 3925 |
| DHUNIV_324 | DIVLMVY | 3926 |
| DHUNIV_325 | IVLMVYA | 3927 |
| DHUNIV_326 | VLMVYAI | 3928 |
| DHUNIV_327 | LMVYAIP | 3929 |
| DHUNIV_328 | DIVLMV | 3930 |
| DHUNIV_329 | IVLMVY | 3931 |
| DHUNIV_330 | VLMVYA | 3932 |
| DHUNIV_331 | LMVYAI | 3933 |
| DHUNIV_332 | MVYAIP | 3934 |
| DHUNIV_333 | DIVLM | 3935 |
| DHUNIV_334 | IVLMV | 3936 |
| DHUNIV_335 | VLMVY | 3937 |
| DHUNIV_336 | LMVYA | 3938 |
| DHUNIV_337 | MVYAI | 3939 |
| DHUNIV_338 | VYAIP | 3940 |
| DHUNIV_339 | DIVL | 3941 |
| DHUNIV_340 | IVLM | 3942 |
| DHUNIV_341 | VLMV | 3943 |
| DHUNIV_342 | LMVY | 3944 |
| DHUNIV_343 | MVYA | 3945 |
| DHUNIV_344 | VYAI | 3946 |
| DHUNIV_345 | YAIP | 3947 |
| DHUNIV_346 | IVL | n/a |
| DHUNIV_347 | VLM | n/a |
| DHUNIV_348 | LMV | n/a |
| DHUNIV_349 | MVY | n/a |
| DHUNIV_350 | VYA | n/a |
| DHUNIV_351 | YAI | n/a |
| DHUNIV_352 | VL | n/a |
| DHUNIV_353 | LM | n/a |
| DHUNIV_354 | MV | n/a |
| DHUNIV_355 | VY | n/a |
| DHUNIV_356 | VLLWFGELL | 3948 |
| DHUNIV_357 | VLLWFGEL | 3949 |
| DHUNIV_358 | LLWFGELL | 3950 |
| DHUNIV_359 | VLLWFGE | 3951 |
| DHUNIV_360 | LLWFGEL | 3952 |
| DHUNIV_361 | LWFGELL | 3953 |
| DHUNIV_362 | VLLWFG | 3954 |
| DHUNIV_363 | LLWFGE | 3955 |
| DHUNIV_364 | LWFGEL | 3956 |
| DHUNIV_365 | WFGELL | 3957 |
| DHUNIV_366 | VLLWF | 3958 |
| DHUNIV_367 | LLWFG | 3959 |
| DHUNIV_368 | LWFGE | 3960 |
| DHUNIV_369 | WFGEL | 3961 |
| DHUNIV_370 | FGELL | 3962 |
| DHUNIV_371 | VLLW | 3963 |
| DHUNIV_372 | LLWF | 3964 |
| DHUNIV_373 | LWFG | 3965 |
| DHUNIV_374 | WFGE | 3966 |
| DHUNIV_375 | FGEL | 3967 |
| DHUNIV_376 | GELL | 3968 |
| DHUNIV_377 | VLL | n/a |
| DHUNIV_378 | LLW | n/a |
| DHUNIV_379 | LWF | n/a |
| DHUNIV_380 | WFG | n/a |
| DHUNIV_381 | FGE | n/a |
| DHUNIV_382 | GEL | n/a |
| DHUNIV_383 | WF | n/a |
| DHUNIV_384 | FG | n/a |
| DHUNIV_385 | GE | n/a |
| DHUNIV_386 | YYYGSGSYYN | 3969 |
| DHUNIV_387 | YYYGSGSYY | 3970 |
| DHUNIV_388 | YYGSGSYYN | 3971 |
| DHUNIV_389 | YYYGSGSY | 3972 |
| DHUNIV_390 | YYGSGSYY | 3973 |
| DHUNIV_391 | YGSGSYYN | 3974 |
| DHUNIV_392 | YYYGSGS | 3975 |
| DHUNIV_393 | YYGSGSY | 3976 |
| DHUNIV_394 | YGSGSYY | 3977 |
| DHUNIV_395 | GSGSYYN | 3978 |
| DHUNIV_396 | YYYGSG | 3979 |
| DHUNIV_397 | YYGSGS | 3980 |
| DHUNIV_398 | YGSGSY | 3981 |
| DHUNIV_399 | GSGSYY | 3982 |
| DHUNIV_400 | SGSYYN | 3983 |
| DHUNIV_401 | YYYGS | 3984 |
| DHUNIV_402 | YYGSG | 3985 |
| DHUNIV_403 | YGSGS | 3986 |
| DHUNIV_404 | GSGSY | 3987 |
| DHUNIV_405 | GSYYN | 3988 |
| DHUNIV_406 | YYYG | 3989 |
| DHUNIV_407 | YYGS | 3990 |
| DHUNIV_408 | YGSG | 3991 |
| DHUNIV_409 | GSGS | 3992 |
| DHUNIV_410 | SYYN | 3993 |
| DHUNIV_411 | YYY | n/a |
| DHUNIV_412 | YYG | n/a |
| DHUNIV_413 | YGS | n/a |
| DHUNIV_414 | GSG | n/a |
| DHUNIV_415 | YYN | n/a |
| DHUNIV_416 | YG | n/a |
| DHUNIV_417 | ITMVRGVIIT | 3994 |
| DHUNIV_418 | ITMVRGVII | 3995 |
| DHUNIV_419 | TMVRGVIIT | 3996 |
| DHUNIV_420 | ITMVRGVI | 3997 |
| DHUNIV_421 | TMVRGVII | 3998 |
| DHUNIV_422 | MVRGVIIT | 3999 |
| DHUNIV_423 | ITMVRGV | 4000 |
| DHUNIV_424 | TMVRGVI | 4001 |
| DHUNIV_425 | MVRGVII | 4002 |
| DHUNIV_426 | VRGVIIT | 4003 |
| DHUNIV_427 | ITMVRG | 4004 |
| DHUNIV_428 | TMVRGV | 4005 |
| DHUNIV_429 | MVRGVI | 4006 |
| DHUNIV_430 | VRGVII | 4007 |
| DHUNIV_431 | RGVIIT | 4008 |
| DHUNIV_432 | ITMVR | 4009 |
| DHUNIV_433 | TMVRG | 4010 |
| DHUNIV_434 | MVRGV | 4011 |
| DHUNIV_435 | VRGVI | 4012 |
| DHUNIV_436 | RGVII | 4013 |
| DHUNIV_437 | GVIIT | 4014 |
| DHUNIV_438 | ITMV | 4015 |
| DHUNIV_439 | TMVR | 4016 |
| DHUNIV_440 | MVRG | 4017 |
| DHUNIV_441 | VRGV | 4018 |
| DHUNIV_442 | RGVI | 4019 |
| DHUNIV_443 | GVII | 4020 |
| DHUNIV_444 | VIIT | 4021 |
| DHUNIV_445 | ITM | n/a |
| DHUNIV_446 | TMV | n/a |
| DHUNIV_447 | MVR | n/a |
| DHUNIV_448 | VRG | n/a |
| DHUNIV_449 | RGV | n/a |
| DHUNIV_450 | GVI | n/a |
| DHUNIV_451 | VII | n/a |
| DHUNIV_452 | IIT | n/a |
| DHUNIV_453 | TM | n/a |
| DHUNIV_454 | VR | n/a |
| DHUNIV_455 | RG | n/a |
| DHUNIV_456 | II | n/a |
| DHUNIV_457 | VLLWFRELL | 4022 |
| DHUNIV_458 | VLLWFREL | 4023 |
| DHUNIV_459 | LLWFRELL | 4024 |
| DHUNIV_460 | VLLWFRE | 4025 |
| DHUNIV_461 | LLWFREL | 4026 |
| DHUNIV_462 | LWFRELL | 4027 |
| DHUNIV_463 | VLLWFR | 4028 |
| DHUNIV_464 | LLWFRE | 4029 |
| DHUNIV_465 | LWFREL | 4030 |
| DHUNIV_466 | WFRELL | 4031 |
| DHUNIV_467 | LLWFR | 4032 |
| DHUNIV_468 | LWFRE | 4033 |
| DHUNIV_469 | WFREL | 4034 |
| DHUNIV_470 | FRELL | 4035 |
| DHUNIV_471 | LWFR | 4036 |
| DHUNIV_472 | WFRE | 4037 |
| DHUNIV_473 | FREL | 4038 |
| DHUNIV_474 | RELL | 4039 |
| DHUNIV_475 | WFR | n/a |
| DHUNIV_476 | FRE | n/a |
| DHUNIV_477 | REL | n/a |
| DHUNIV_478 | FR | n/a |
| DHUNIV_479 | RE | n/a |
| DHUNIV_480 | ITMVQGVIIT | 4040 |
| DHUNIV_481 | ITMVQGVII | 4041 |
| DHUNIV_482 | TMVQGVIIT | 4042 |
| DHUNIV_483 | ITMVQGVI | 4043 |
| DHUNIV_484 | TMVQGVII | 4044 |
| DHUNIV_485 | MVQGVIIT | 4045 |
| DHUNIV_486 | ITMVQGV | 4046 |
| DHUNIV_487 | TMVQGVI | 4047 |
| DHUNIV_488 | MVQGVII | 4048 |
| DHUNIV_489 | VQGVIIT | 4049 |
| DHUNIV_490 | ITMVQG | 4050 |
| DHUNIV_491 | TMVQGV | 4051 |
| DHUNIV_492 | MVQGVI | 4052 |
| DHUNIV_493 | VQGVII | 4053 |
| DHUNIV_494 | QGVIIT | 4054 |
| DHUNIV_495 | ITMVQ | 4055 |
| DHUNIV_496 | TMVQG | 4056 |
| DHUNIV_497 | MVQGV | 4057 |
| DHUNIV_498 | VQGVI | 4058 |
| DHUNIV_499 | QGVII | 4059 |
| DHUNIV_500 | TMVQ | 4060 |
| DHUNIV_501 | MVQG | 4061 |
| DHUNIV_502 | VQGV | 4062 |
| DHUNIV_503 | QGVI | 4063 |
| DHUNIV_504 | MVQ | n/a |
| DHUNIV_505 | VQG | n/a |
| DHUNIV_506 | QGV | n/a |
| DHUNIV_507 | QG | n/a |
| DHUNIV_508 | LRLGEL | 4064 |
| DHUNIV_509 | LRLGE | 4065 |
| DHUNIV_510 | RLGEL | 4066 |
| DHUNIV_511 | LRLG | 4067 |
| DHUNIV_512 | RLGE | 4068 |
| DHUNIV_513 | LGEL | 4069 |
| DHUNIV_514 | LRL | n/a |
| DHUNIV_515 | RLG | n/a |
| DHUNIV_516 | LGE | n/a |
| DHUNIV_517 | LR | n/a |
| DHUNIV_518 | RL | n/a |
| DHUNIV_519 | LG | n/a |
| DHUNIV_520 | YYDYVWGSYAYT | 4070 |
| DHUNIV_521 | YYDYVWGSYAY | 4071 |
| DHUNIV_522 | YDYVWGSYAYT | 4072 |
| DHUNIV_523 | YYDYVWGSYA | 4073 |
| DHUNIV_524 | YDYVWGSYAY | 4074 |
| DHUNIV_525 | DYVWGSYAYT | 4075 |
| DHUNIV_526 | YYDYVWGSY | 4076 |
| DHUNIV_527 | YDYVWGSYA | 4077 |
| DHUNIV_528 | DYVWGSYAY | 4078 |
| DHUNIV_529 | YVWGSYAYT | 4079 |
| DHUNIV_530 | YYDYVWGS | 4080 |
| DHUNIV_531 | YDYVWGSY | 4081 |
| DHUNIV_532 | DYVWGSYA | 4082 |
| DHUNIV_533 | YVWGSYAY | 4083 |
| DHUNIV_534 | VWGSYAYT | 4084 |
| DHUNIV_535 | YYDYVWG | 4085 |
| DHUNIV_536 | YDYVWGS | 4086 |
| DHUNIV_537 | DYVWGSY | 4087 |
| DHUNIV_538 | YVWGSYA | 4088 |
| DHUNIV_539 | VWGSYAY | 4089 |
| DHUNIV_540 | WGSYAYT | 4090 |
| DHUNIV_541 | YYDYVW | 4091 |
| DHUNIV_542 | YDYVWG | 4092 |
| DHUNIV_543 | DYVWGS | 4093 |
| DHUNIV_544 | YVWGSY | 4094 |
| DHUNIV_545 | VWGSYA | 4095 |
| DHUNIV_546 | WGSYAY | 4096 |
| DHUNIV_547 | GSYAYT | 4097 |
| DHUNIV_548 | YYDYV | 4098 |
| DHUNIV_549 | YDYVW | 4099 |
| DHUNIV_550 | DYVWG | 4100 |
| DHUNIV_551 | YVWGS | 4101 |
| DHUNIV_552 | VWGSY | 4102 |
| DHUNIV_553 | WGSYA | 4103 |
| DHUNIV_554 | GSYAY | 4104 |
| DHUNIV_555 | SYAYT | 4105 |
| DHUNIV_556 | YYDY | 4106 |
| DHUNIV_557 | YDYV | 4107 |
| DHUNIV_558 | DYVW | 4108 |
| DHUNIV_559 | YVWG | 4109 |
| DHUNIV_560 | VWGS | 4110 |
| DHUNIV_561 | WGSY | 4111 |
| DHUNIV_562 | GSYA | 4112 |
| DHUNIV_563 | SYAY | 4113 |
| DHUNIV_564 | YAYT | 4114 |
| DHUNIV_565 | YYD | n/a |
| DHUNIV_566 | YDY | n/a |
| DHUNIV_567 | DYV | n/a |
| DHUNIV_568 | YVW | n/a |
| DHUNIV_569 | VWG | n/a |
| DHUNIV_570 | WGS | n/a |
| DHUNIV_571 | SYA | n/a |
| DHUNIV_572 | YAY | n/a |
| DHUNIV_573 | AYT | n/a |
| DHUNIV_574 | YD | n/a |
| DHUNIV_575 | DY | n/a |
| DHUNIV_576 | YV | n/a |
| DHUNIV_577 | VW | n/a |
| DHUNIV_578 | WG | n/a |
| DHUNIV_579 | IMITFGGVMLIP | 4115 |
| DHUNIV_580 | IMITFGGVMLI | 4116 |
| DHUNIV_581 | MITFGGVMLIP | 4117 |
| DHUNIV_582 | IMITFGGVML | 4118 |
| DHUNIV_583 | MITFGGVMLI | 4119 |
| DHUNIV_584 | ITFGGVMLIP | 4120 |
| DHUNIV_585 | IMITFGGVM | 4121 |
| DHUNIV_586 | MITFGGVML | 4122 |
| DHUNIV_587 | ITFGGVMLI | 4123 |
| DHUNIV_588 | TFGGVMLIP | 4124 |
| DHUNIV_589 | IMITFGGV | 4125 |
| DHUNIV_590 | MITFGGVM | 4126 |
| DHUNIV_591 | ITFGGVML | 4127 |
| DHUNIV_592 | TFGGVMLI | 4128 |
| DHUNIV_593 | FGGVMLIP | 4129 |
| DHUNIV_594 | IMITFGG | 4130 |
| DHUNIV_595 | MITFGGV | 4131 |
| DHUNIV_596 | ITFGGVM | 4132 |
| DHUNIV_597 | TFGGVML | 4133 |
| DHUNIV_598 | FGGVMLI | 4134 |
| DHUNIV_599 | GGVMLIP | 4135 |
| DHUNIV_600 | IMITFG | 4136 |
| DHUNIV_601 | MITFGG | 4137 |
| DHUNIV_602 | ITFGGV | 4138 |
| DHUNIV_603 | TFGGVM | 4139 |
| DHUNIV_604 | FGGVML | 4140 |
| DHUNIV_605 | GGVMLI | 4141 |
| DHUNIV_606 | GVMLIP | 4142 |
| DHUNIV_607 | IMITF | 4143 |
| DHUNIV_608 | MITFG | 4144 |
| DHUNIV_609 | ITFGG | 4145 |
| DHUNIV_610 | TFGGV | 4146 |
| DHUNIV_611 | FGGVM | 4147 |
| DHUNIV_612 | GGVML | 4148 |
| DHUNIV_613 | GVMLI | 4149 |
| DHUNIV_614 | VMLIP | 4150 |
| DHUNIV_615 | IMIT | 4151 |
| DHUNIV_616 | MITF | 4152 |
| DHUNIV_617 | ITFG | 4153 |
| DHUNIV_618 | TFGG | 4154 |
| DHUNIV_619 | FGGV | 4155 |
| DHUNIV_620 | GGVM | 4156 |
| DHUNIV_621 | GVML | 4157 |
| DHUNIV_622 | VMLI | 4158 |
| DHUNIV_623 | MLIP | 4159 |
| DHUNIV_624 | IMI | n/a |
| DHUNIV_625 | MIT | n/a |
| DHUNIV_626 | ITF | n/a |
| DHUNIV_627 | TFG | n/a |
| DHUNIV_628 | FGG | n/a |
| DHUNIV_629 | GGV | n/a |
| DHUNIV_630 | GVM | n/a |
| DHUNIV_631 | VML | n/a |
| DHUNIV_632 | MLI | n/a |
| DHUNIV_633 | LIP | n/a |
| DHUNIV_634 | IM | n/a |
| DHUNIV_635 | MI | n/a |
| DHUNIV_636 | TF | n/a |
| DHUNIV_637 | VM | n/a |
| DHUNIV_638 | LI | n/a |
| DHUNIV_639 | WLLL | 4160 |
| DHUNIV_640 | WLL | n/a |
| DHUNIV_641 | WL | n/a |
| DHUNIV_642 | YYYDSSGYYY | 4161 |
| DHUNIV_643 | YYYDSSGYY | 4162 |
| DHUNIV_644 | YYDSSGYYY | 4163 |
| DHUNIV_645 | YYYDSSGY | 4164 |
| DHUNIV_646 | YYDSSGYY | 4165 |
| DHUNIV_647 | YDSSGYYY | 4166 |
| DHUNIV_648 | YYYDSSG | 4167 |
| DHUNIV_649 | YYDSSGY | 4168 |
| DHUNIV_650 | YDSSGYY | 4169 |
| DHUNIV_651 | DSSGYYY | 4170 |
| DHUNIV_652 | YYYDSS | 4171 |
| DHUNIV_653 | YYDSSG | 4172 |
| DHUNIV_654 | YDSSGY | 4173 |
| DHUNIV_655 | DSSGYY | 4174 |
| DHUNIV_656 | SSGYYY | 4175 |
| DHUNIV_657 | YYYDS | 4176 |
| DHUNIV_658 | YYDSS | 4177 |
| DHUNIV_659 | YDSSG | 4178 |
| DHUNIV_660 | DSSGY | 4179 |
| DHUNIV_661 | SSGYY | 4180 |
| DHUNIV_662 | SGYYY | 4181 |
| DHUNIV_663 | YYYD | 4182 |
| DHUNIV_664 | YYDS | 4183 |
| DHUNIV_665 | YDSS | 4184 |
| DHUNIV_666 | DSSG | 4185 |
| DHUNIV_667 | SSGY | 4186 |
| DHUNIV_668 | SGYY | 4187 |
| DHUNIV_669 | GYYY | 4188 |
| DHUNIV_670 | YDS | n/a |
| DHUNIV_671 | DSS | n/a |
| DHUNIV_672 | SSG | n/a |
| DHUNIV_673 | SGY | n/a |
| DHUNIV_674 | GYY | n/a |
| DHUNIV_675 | DS | n/a |
| DHUNIV_676 | ITMIVVVITT | 4189 |
| DHUNIV_677 | ITMIVVVIT | 4190 |
| DHUNIV_678 | TMIVVVITT | 4191 |
| DHUNIV_679 | ITMIVVVI | 4192 |
| DHUNIV_680 | TMIVVVIT | 4193 |
| DHUNIV_681 | MIVVVITT | 4194 |
| DHUNIV_682 | ITMIVVV | 4195 |
| DHUNIV_683 | TMIVVVI | 4196 |
| DHUNIV_684 | MIVVVIT | 4197 |
| DHUNIV_685 | IVVVITT | 4198 |
| DHUNIV_686 | ITMIVV | 4199 |
| DHUNIV_687 | TMIVVV | 4200 |
| DHUNIV_688 | MIVVVI | 4201 |
| DHUNIV_689 | IVVVIT | 4202 |
| DHUNIV_690 | VVVITT | 4203 |
| DHUNIV_691 | ITMIV | 4204 |
| DHUNIV_692 | TMIVV | 4205 |
| DHUNIV_693 | MIVVV | 4206 |
| DHUNIV_694 | VVVIT | 4207 |
| DHUNIV_695 | VVITT | 4208 |
| DHUNIV_696 | ITMI | 4209 |
| DHUNIV_697 | TMIV | 4210 |
| DHUNIV_698 | MIVV | 4211 |
| DHUNIV_699 | VVIT | 4212 |
| DHUNIV_700 | VITT | 4213 |
| DHUNIV_701 | TMI | n/a |
| DHUNIV_702 | MIV | n/a |
| DHUNIV_703 | VIT | n/a |
| DHUNIV_704 | ITT | n/a |
| DHUNIV_705 | VLRFLEWLLY | 4214 |
| DHUNIV_706 | VLRFLEWLL | 4215 |
| DHUNIV_707 | LRFLEWLLY | 4216 |
| DHUNIV_708 | VLRFLEWL | 4217 |
| DHUNIV_709 | LRFLEWLL | 4218 |
| DHUNIV_710 | RFLEWLLY | 4219 |
| DHUNIV_711 | VLRFLEW | 4220 |
| DHUNIV_712 | LRFLEWL | 4221 |
| DHUNIV_713 | RFLEWLL | 4222 |
| DHUNIV_714 | FLEWLLY | 4223 |
| DHUNIV_715 | VLRFLE | 4224 |
| DHUNIV_716 | LRFLEW | 4225 |
| DHUNIV_717 | RFLEWL | 4226 |
| DHUNIV_718 | FLEWLL | 4227 |
| DHUNIV_719 | LEWLLY | 4228 |
| DHUNIV_720 | VLRFL | 4229 |
| DHUNIV_721 | LRFLE | 4230 |
| DHUNIV_722 | RFLEW | 4231 |
| DHUNIV_723 | FLEWL | 4232 |
| DHUNIV_724 | LEWLL | 4233 |
| DHUNIV_725 | EWLLY | 4234 |
| DHUNIV_726 | VLRF | 4235 |
| DHUNIV_727 | LRFL | 4236 |
| DHUNIV_728 | RFLE | 4237 |
| DHUNIV_729 | FLEW | 4238 |
| DHUNIV_730 | LEWL | 4239 |
| DHUNIV_731 | EWLL | 4240 |
| DHUNIV_732 | WLLY | 4241 |
| DHUNIV_733 | VLR | n/a |
| DHUNIV_734 | LRF | n/a |
| DHUNIV_735 | RFL | n/a |
| DHUNIV_736 | FLE | n/a |
| DHUNIV_737 | LEW | n/a |
| DHUNIV_738 | EWL | n/a |
| DHUNIV_739 | RF | n/a |
| DHUNIV_740 | FL | n/a |
| DHUNIV_741 | EW | n/a |
| DHUNIV_742 | YYDFWSGYYT | 4242 |
| DHUNIV_743 | YYDFWSGYY | 4243 |
| DHUNIV_744 | YDFWSGYYT | 4244 |
| DHUNIV_745 | YYDFWSGY | 4245 |
| DHUNIV_746 | YDFWSGYY | 4246 |
| DHUNIV_747 | DFWSGYYT | 4247 |
| DHUNIV_748 | YYDFWSG | 4248 |
| DHUNIV_749 | YDFWSGY | 4249 |
| DHUNIV_750 | DFWSGYY | 4250 |
| DHUNIV_751 | FWSGYYT | 4251 |
| DHUNIV_752 | YYDFWS | 4252 |
| DHUNIV_753 | YDFWSG | 4253 |
| DHUNIV_754 | DFWSGY | 4254 |
| DHUNIV_755 | FWSGYY | 4255 |
| DHUNIV_756 | WSGYYT | 4256 |
| DHUNIV_757 | YYDFW | 4257 |
| DHUNIV_758 | YDFWS | 4258 |
| DHUNIV_759 | DFWSG | 4259 |
| DHUNIV_760 | FWSGY | 4260 |
| DHUNIV_761 | WSGYY | 4261 |
| DHUNIV_762 | SGYYT | 4262 |
| DHUNIV_763 | YYDF | 4263 |
| DHUNIV_764 | YDFW | 4264 |
| DHUNIV_765 | DFWS | 4265 |
| DHUNIV_766 | FWSG | 4266 |
| DHUNIV_767 | WSGY | 4267 |
| DHUNIV_768 | GYYT | 4268 |
| DHUNIV_769 | YDF | n/a |
| DHUNIV_770 | DFW | n/a |
| DHUNIV_771 | FWS | n/a |
| DHUNIV_772 | WSG | n/a |
| DHUNIV_773 | YYT | n/a |
| DHUNIV_774 | DF | n/a |
| DHUNIV_775 | FW | n/a |
| DHUNIV_776 | WS | n/a |
| DHUNIV_777 | ITIFGVVIIP | 4269 |
| DHUNIV_778 | ITIFGVVII | 4270 |
| DHUNIV_779 | TIFGVVIIP | 4271 |
| DHUNIV_780 | ITIFGVVI | 4272 |
| DHUNIV_781 | TIFGVVII | 4273 |
| DHUNIV_782 | IFGVVIIP | 4274 |
| DHUNIV_783 | ITIFGVV | 4275 |
| DHUNIV_784 | TIFGVVI | 4276 |
| DHUNIV_785 | IFGVVII | 4277 |
| DHUNIV_786 | FGVVIIP | 4278 |
| DHUNIV_787 | ITIFGV | 4279 |
| DHUNIV_788 | TIFGVV | 4280 |
| DHUNIV_789 | IFGVVI | 4281 |
| DHUNIV_790 | FGVVII | 4282 |
| DHUNIV_791 | GVVIIP | 4283 |
| DHUNIV_792 | ITIFG | 4284 |
| DHUNIV_793 | TIFGV | 4285 |
| DHUNIV_794 | IFGVV | 4286 |
| DHUNIV_795 | FGVVI | 4287 |
| DHUNIV_796 | GVVII | 4288 |
| DHUNIV_797 | VVIIP | 4289 |
| DHUNIV_798 | ITIF | 4290 |
| DHUNIV_799 | TIFG | 4291 |
| DHUNIV_800 | IFGV | 4292 |
| DHUNIV_801 | FGVV | 4293 |
| DHUNIV_802 | GVVI | 4294 |
| DHUNIV_803 | VVII | 4295 |
| DHUNIV_804 | VIIP | 4296 |
| DHUNIV_805 | ITI | n/a |
| DHUNIV_806 | TIF | n/a |
| DHUNIV_807 | IFG | n/a |
| DHUNIV_808 | FGV | n/a |
| DHUNIV_809 | GVV | n/a |
| DHUNIV_810 | IIP | n/a |
| DHUNIV_811 | TI | n/a |
| DHUNIV_812 | IF | n/a |
| DHUNIV_813 | VLRYFDWLL | 4297 |
| DHUNIV_814 | VLRYFDWL | 4298 |
| DHUNIV_815 | LRYFDWLL | 4299 |
| DHUNIV_816 | VLRYFDW | 4300 |
| DHUNIV_817 | LRYFDWL | 4301 |
| DHUNIV_818 | RYFDWLL | 4302 |
| DHUNIV_819 | VLRYFD | 4303 |
| DHUNIV_820 | LRYFDW | 4304 |
| DHUNIV_821 | RYFDWL | 4305 |
| DHUNIV_822 | YFDWLL | 4306 |
| DHUNIV_823 | VLRYF | 4307 |
| DHUNIV_824 | LRYFD | 4308 |
| DHUNIV_825 | RYFDW | 4309 |
| DHUNIV_826 | YFDWL | 4310 |
| DHUNIV_827 | FDWLL | 4311 |
| DHUNIV_828 | VLRY | 4312 |
| DHUNIV_829 | LRYF | 4313 |
| DHUNIV_830 | RYFD | 4314 |
| DHUNIV_831 | YFDW | 4315 |
| DHUNIV_832 | FDWL | 4316 |
| DHUNIV_833 | DWLL | 4317 |
| DHUNIV_834 | LRY | n/a |
| DHUNIV_835 | RYF | n/a |
| DHUNIV_836 | YFD | n/a |
| DHUNIV_837 | FDW | n/a |
| DHUNIV_838 | DWL | n/a |
| DHUNIV_839 | RY | n/a |
| DHUNIV_840 | YF | n/a |
| DHUNIV_841 | FD | n/a |
| DHUNIV_842 | DW | n/a |
| DHUNIV_843 | YYDILTGYYN | 4318 |
| DHUNIV_844 | YYDILTGYY | 4319 |
| DHUNIV_845 | YDILTGYYN | 4320 |
| DHUNIV_846 | YYDILTGY | 4321 |
| DHUNIV_847 | YDILTGYY | 4322 |
| DHUNIV_848 | DILTGYYN | 4323 |
| DHUNIV_849 | YYDILTG | 4324 |
| DHUNIV_850 | YDILTGY | 4325 |
| DHUNIV_851 | DILTGYY | 4326 |
| DHUNIV_852 | ILTGYYN | 4327 |
| DHUNIV_853 | YYDILT | 4328 |
| DHUNIV_854 | YDILTG | 4329 |
| DHUNIV_855 | DILTGY | 4330 |
| DHUNIV_856 | ILTGYY | 4331 |
| DHUNIV_857 | LTGYYN | 4332 |
| DHUNIV_858 | YYDIL | 4333 |
| DHUNIV_859 | YDILT | 4334 |
| DHUNIV_860 | DILTG | 4335 |
| DHUNIV_861 | ILTGY | 4336 |
| DHUNIV_862 | LTGYY | 4337 |
| DHUNIV_863 | TGYYN | 4338 |
| DHUNIV_864 | YYDI | 4339 |
| DHUNIV_865 | YDIL | 4340 |
| DHUNIV_866 | DILT | 4341 |
| DHUNIV_867 | ILTG | 4342 |
| DHUNIV_868 | LTGY | 4343 |
| DHUNIV_869 | TGYY | 4344 |
| DHUNIV_870 | GYYN | 4345 |
| DHUNIV_871 | YDI | n/a |
| DHUNIV_872 | DIL | n/a |
| DHUNIV_873 | ILT | n/a |
| DHUNIV_874 | LTG | n/a |
| DHUNIV_875 | TGY | n/a |
| DHUNIV_876 | LT | n/a |
| DHUNIV_877 | LVIIT | 4346 |
| DHUNIV_878 | LVII | 4347 |
| DHUNIV_879 | LVI | n/a |
| DHUNIV_880 | LV | n/a |
| DHUNIV_881 | DYGDY | 4348 |
| DHUNIV_882 | DYGD | 4349 |
| DHUNIV_883 | YGDY | 4350 |
| DHUNIV_884 | DYG | n/a |
| DHUNIV_885 | YGD | n/a |
| DHUNIV_886 | GDY | n/a |
| DHUNIV_887 | TTVTT | 4351 |
| DHUNIV_888 | TTVT | 4352 |
| DHUNIV_889 | TVTT | 4353 |
| DHUNIV_890 | TTV | n/a |
| DHUNIV_891 | TVT | n/a |
| DHUNIV_892 | VTT | n/a |
| DHUNIV_893 | TV | n/a |
| DHUNIV_894 | LRW | n/a |
| DHUNIV_895 | RW | n/a |
| DHUNIV_896 | DYGGNS | 4354 |
| DHUNIV_897 | DYGGN | 4355 |
| DHUNIV_898 | YGGNS | 4356 |
| DHUNIV_899 | DYGG | 4357 |
| DHUNIV_900 | YGGN | 4358 |
| DHUNIV_901 | GGNS | 4359 |
| DHUNIV_902 | YGG | n/a |
| DHUNIV_903 | GGN | n/a |
| DHUNIV_904 | GNS | n/a |
| DHUNIV_905 | GN | n/a |
| DHUNIV_906 | NS | n/a |
| DHUNIV_907 | TTVVTP | 4360 |
| DHUNIV_908 | TTVVT | 4361 |
| DHUNIV_909 | TVVTP | 4362 |
| DHUNIV_910 | TTVV | 4363 |
| DHUNIV_911 | TVVT | 4364 |
| DHUNIV_912 | VVTP | 4365 |
| DHUNIV_913 | TVV | n/a |
| DHUNIV_914 | VTP | n/a |
| DHUNIV_915 | LQ | n/a |
| DHUNIV_916 | DYSNY | 4366 |
| DHUNIV_917 | DYSN | 4367 |
| DHUNIV_918 | YSNY | 4368 |
| DHUNIV_919 | DYS | n/a |
| DHUNIV_920 | YSN | n/a |
| DHUNIV_921 | SNY | n/a |
| DHUNIV_922 | SN | n/a |
| DHUNIV_923 | VDIVATIT | 4369 |
| DHUNIV_924 | VDIVATI | 4370 |
| DHUNIV_925 | DIVATIT | 4371 |
| DHUNIV_926 | VDIVAT | 4372 |
| DHUNIV_927 | DIVATI | 4373 |
| DHUNIV_928 | IVATIT | 4374 |
| DHUNIV_929 | VDIVA | 4375 |
| DHUNIV_930 | DIVAT | 4376 |
| DHUNIV_931 | IVATI | 4377 |
| DHUNIV_932 | VATIT | 4378 |
| DHUNIV_933 | VDIV | 4379 |
| DHUNIV_934 | DIVA | 4380 |
| DHUNIV_935 | IVAT | 4381 |
| DHUNIV_936 | VATI | 4382 |
| DHUNIV_937 | ATIT | 4383 |
| DHUNIV_938 | VDI | n/a |
| DHUNIV_939 | IVA | n/a |
| DHUNIV_940 | VAT | n/a |
| DHUNIV_941 | ATI | n/a |
| DHUNIV_942 | TIT | n/a |
| DHUNIV_943 | VD | n/a |
| DHUNIV_944 | WLRL | 4384 |
| DHUNIV_945 | WLR | n/a |
| DHUNIV_946 | GYSGYDY | 4385 |
| DHUNIV_947 | GYSGYD | 4386 |
| DHUNIV_948 | YSGYDY | 4387 |
| DHUNIV_949 | GYSGY | 4388 |
| DHUNIV_950 | YSGYD | 4389 |
| DHUNIV_951 | SGYDY | 4390 |
| DHUNIV_952 | GYSG | 4391 |
| DHUNIV_953 | YSGY | 4392 |
| DHUNIV_954 | SGYD | 4393 |
| DHUNIV_955 | GYDY | 4394 |
| DHUNIV_956 | GYS | n/a |
| DHUNIV_957 | GYD | n/a |
| DHUNIV_958 | VEMATIT | 4395 |
| DHUNIV_959 | VEMATI | 4396 |
| DHUNIV_960 | EMATIT | 4397 |
| DHUNIV_961 | VEMAT | 4398 |
| DHUNIV_962 | EMATI | 4399 |
| DHUNIV_963 | MATIT | 4400 |
| DHUNIV_964 | VEMA | 4401 |
| DHUNIV_965 | EMAT | 4402 |
| DHUNIV_966 | MATI | 4403 |
| DHUNIV_967 | VEM | n/a |
| DHUNIV_968 | EMA | n/a |
| DHUNIV_969 | MAT | n/a |
| DHUNIV_970 | VE | n/a |
| DHUNIV_971 | EM | n/a |
| DHUNIV_972 | MA | n/a |
| DHUNIV_973 | RWLQL | 4404 |
| DHUNIV_974 | RWLQ | 4405 |
| DHUNIV_975 | WLQL | 4406 |
| DHUNIV_976 | RWL | n/a |
| DHUNIV_977 | WLQ | n/a |
| DHUNIV_978 | LQL | n/a |
| DHUNIV_979 | RDGYNY | 4407 |
| DHUNIV_980 | RDGYN | 4408 |
| DHUNIV_981 | DGYNY | 4409 |
| DHUNIV_982 | RDGY | 4410 |
| DHUNIV_983 | DGYN | 4411 |
| DHUNIV_984 | GYNY | 4412 |
| DHUNIV_985 | RDG | n/a |
| DHUNIV_986 | DGY | n/a |
| DHUNIV_987 | GYN | n/a |
| DHUNIV_988 | YNY | n/a |
| DHUNIV_989 | RD | n/a |
| DHUNIV_990 | DG | n/a |
| DHUNIV_991 | VDTAMVT | 4413 |
| DHUNIV_992 | VDTAMV | 4414 |
| DHUNIV_993 | DTAMVT | 4415 |
| DHUNIV_994 | VDTAM | 4416 |
| DHUNIV_995 | DTAMV | 4417 |
| DHUNIV_996 | TAMVT | 4418 |
| DHUNIV_997 | VDTA | 4419 |
| DHUNIV_998 | DTAM | 4420 |
| DHUNIV_999 | TAMV | 4421 |
| DHUNIV_1000 | AMVT | 4422 |
| DHUNIV_1001 | VDT | n/a |
| DHUNIV_1002 | DTA | n/a |
| DHUNIV_1003 | TAM | n/a |
| DHUNIV_1004 | AMV | n/a |
| DHUNIV_1005 | MVT | n/a |
| DHUNIV_1006 | DT | n/a |
| DHUNIV_1007 | WIQLWL | 4423 |
| DHUNIV_1008 | WIQLW | 4424 |
| DHUNIV_1009 | IQLWL | 4425 |
| DHUNIV_1010 | WIQL | 4426 |
| DHUNIV_1011 | IQLW | 4427 |
| DHUNIV_1012 | QLWL | 4428 |
| DHUNIV_1013 | WIQ | n/a |
| DHUNIV_1014 | IQL | n/a |
| DHUNIV_1015 | QLW | n/a |
| DHUNIV_1016 | LWL | n/a |
| DHUNIV_1017 | IQ | n/a |
| DHUNIV_1018 | GYSYGY | 4429 |
| DHUNIV_1019 | GYSYG | 4430 |
| DHUNIV_1020 | YSYGY | 4431 |
| DHUNIV_1021 | GYSY | 4432 |
| DHUNIV_1022 | YSYG | 4433 |
| DHUNIV_1023 | SYGY | 4434 |
| DHUNIV_1024 | YSY | n/a |
| DHUNIV_1025 | SYG | n/a |
| DHUNIV_1026 | YGY | n/a |
| DHUNIV_1027 | GYSSSWY | 4435 |
| DHUNIV_1028 | GYSSSW | 4436 |
| DHUNIV_1029 | YSSSWY | 4437 |
| DHUNIV_1030 | GYSSS | 4438 |
| DHUNIV_1031 | YSSSW | 4439 |
| DHUNIV_1032 | SSSWY | 4440 |
| DHUNIV_1033 | GYSS | 4441 |
| DHUNIV_1034 | YSSS | 4442 |
| DHUNIV_1035 | SSSW | 4443 |
| DHUNIV_1036 | SSWY | 4444 |
| DHUNIV_1037 | YSS | n/a |
| DHUNIV_1038 | SSS | n/a |
| DHUNIV_1039 | SSW | n/a |
| DHUNIV_1040 | SWY | n/a |
| DHUNIV_1041 | SW | n/a |
| DHUNIV_1042 | WY | n/a |
| DHUNIV_1043 | GIAAAGT | 4445 |
| DHUNIV_1044 | GIAAAG | 4446 |
| DHUNIV_1045 | IAAAGT | 4447 |
| DHUNIV_1046 | GIAAA | 4448 |
| DHUNIV_1047 | IAAAG | 4449 |
| DHUNIV_1048 | AAAGT | 4450 |
| DHUNIV_1049 | GIAA | 4451 |
| DHUNIV_1050 | IAAA | 4452 |
| DHUNIV_1051 | AAAG | 4453 |
| DHUNIV_1052 | AAGT | 4454 |
| DHUNIV_1053 | GIA | n/a |
| DHUNIV_1054 | IAA | n/a |
| DHUNIV_1055 | AAA | n/a |
| DHUNIV_1056 | AAG | n/a |
| DHUNIV_1057 | AGT | n/a |
| DHUNIV_1058 | AG | n/a |
| DHUNIV_1059 | QQLV | 4455 |
| DHUNIV_1060 | QQL | n/a |
| DHUNIV_1061 | QLV | n/a |
| DHUNIV_1062 | QQ | n/a |
| DHUNIV_1063 | GYSSGWY | 4456 |
| DHUNIV_1064 | GYSSGW | 4457 |
| DHUNIV_1065 | YSSGWY | 4458 |
| DHUNIV_1066 | GYSSG | 4459 |
| DHUNIV_1067 | YSSGW | 4460 |
| DHUNIV_1068 | SSGWY | 4461 |
| DHUNIV_1069 | YSSG | 4462 |
| DHUNIV_1070 | SSGW | 4463 |
| DHUNIV_1071 | SGWY | 4464 |
| DHUNIV_1072 | SGW | n/a |
| DHUNIV_1073 | GWY | n/a |
| DHUNIV_1074 | GW | n/a |
| DHUNIV_1075 | GIAVAGT | 4465 |
| DHUNIV_1076 | GIAVAG | 4466 |
| DHUNIV_1077 | IAVAGT | 4467 |
| DHUNIV_1078 | GIAVA | 4468 |
| DHUNIV_1079 | IAVAG | 4469 |
| DHUNIV_1080 | AVAGT | 4470 |
| DHUNIV_1081 | GIAV | 4471 |
| DHUNIV_1082 | IAVA | 4472 |
| DHUNIV_1083 | AVAG | 4473 |
| DHUNIV_1084 | VAGT | 4474 |
| DHUNIV_1085 | IAV | n/a |
| DHUNIV_1086 | AVA | n/a |
| DHUNIV_1087 | VAG | n/a |
| DHUNIV_1088 | AV | n/a |
| DHUNIV_1089 | QWLV | 4475 |
| DHUNIV_1090 | QWL | n/a |
| DHUNIV_1091 | WLV | n/a |
| DHUNIV_1092 | QW | n/a |
| DHUNIV_1093 | EYSSSS | 4476 |
| DHUNIV_1094 | EYSSS | 4477 |
| DHUNIV_1095 | YSSSS | 4478 |
| DHUNIV_1096 | EYSS | 4479 |
| DHUNIV_1097 | SSSS | 4480 |
| DHUNIV_1098 | EYS | n/a |
| DHUNIV_1099 | EY | n/a |
| DHUNIV_1100 | SIAARP | 4481 |
| DHUNIV_1101 | SIAAR | 4482 |
| DHUNIV_1102 | IAARP | 4483 |
| DHUNIV_1103 | SIAA | 4484 |
| DHUNIV_1104 | IAAR | 4485 |
| DHUNIV_1105 | AARP | 4486 |
| DHUNIV_1106 | SIA | n/a |
| DHUNIV_1107 | AAR | n/a |
| DHUNIV_1108 | ARP | n/a |
| DHUNIV_1109 | AR | n/a |
| DHUNIV_1110 | RP | n/a |
| DHUNIV_1111 | NWG | n/a |

TABLE 12
Theoretical segment pool of 141 N2 segments in
Theoretical Segment Pool 1 (TSP1).

| Segment Type | Sequences | Number |
|---|---|---|
| “Zero” | (no addition) V segment joins | 1 |
| | directly to D segment | |
| Monomers | G, P, R, A, S, L, T, V, D, E, | 18 |
| | F, H, I, K, M, Q, W, Y | |
| Dimers | GG, GP, GR, GA, GS, GL, GT, | 82 |
| | GV, PG, RG, AG, SG, LG, TG, | |
| | VG, PP, PR, PA, PS, PL, PT, | |
| | PV, RP, AP, SP, LP, TP, VP, | |
| | AR, AS, AT, AY, DL, DT, EA, | |
| | EK, FH, FS, HL, HW, IS, KV, | |
| | LD, LE, LR, LS, LT, NR, NT, | |
| | QE, QL, QT, RA, RD, RE, RF, | |
| | RH, RL, RR, RS, RV, SA, SD, | |
| | SE, SF, SI, SK, SL, SQ, SR, | |
| | SS, ST, SV, TA, TR, TS, TT, | |
| | TW, VD, VS, WS, YS | |
| Trimers | GGG, GPG, GRG, GAG, GSG, GLG, | 40 |
| | GTG, GVG, PGG, RGG, AGG, SGG, | |
| | LGG, TGG, VGG, GGP, GGR, GGA, | |
| | GGS, GGL, GGT, GGV , AAE, AYH, | |
| | DTL, EKR, ISR, NTP, PKS, PRP, | |
| | PTA, PTQ, REL, RPL, SAA, SAL, | |
| | SGL, SSE, TGL, WGT | |

TABLE 13
Theoretical segment pool of 285 H3-JH segments.

| H3-JH | | |
|---|---|---|
| Segment | Amino Acid | |
| Name | Sequence | SEQ ID NO |
| JHUNIV_001 | TEYFQH | 4487 |
| JHUNIV_002 | EYFQH | 4488 |
| JHUNIV_003 | YFQH | 4489 |
| JHUNIV_004 | FQH | n/a |
| JHUNIV_005 | QH | n/a |
| JHUNIV_006 | H | n/a |
| JHUNIV_007 | | n/a |
| JHUNIV_008 | SEYFQH | 4490 |
| JHUNIV_009 | PEYFQH | 4491 |
| JHUNIV_010 | FEYFQH | 4492 |
| JHUNIV_011 | HEYFQH | 4493 |
| JHUNIV_012 | REYFQH | 4494 |
| JHUNIV_013 | LEYFQH | 4495 |
| JHUNIV_014 | NEYFQH | 4496 |
| JHUNIV_015 | IEYFQH | 4497 |
| JHUNIV_016 | DEYFQH | 4498 |
| JHUNIV_017 | GEYFQH | 4499 |
| JHUNIV_018 | VEYFQH | 4500 |
| JHUNIV_019 | YEYFQH | 4501 |
| JHUNIV_020 | KYFQH | 4502 |
| JHUNIV_021 | QYFQH | 4503 |
| JHUNIV_022 | LYFQH | 4504 |
| JHUNIV_023 | SYFQH | 4505 |
| JHUNIV_024 | RYFQH | 4506 |
| JHUNIV_025 | PYFQH | 4507 |
| JHUNIV_026 | IYFQH | 4508 |
| JHUNIV_027 | TYFQH | 4509 |
| JHUNIV_028 | GYFQH | 4510 |
| JHUNIV_029 | VYFQH | 4511 |
| JHUNIV_030 | AYFQH | 4512 |
| JHUNIV_031 | NFQH | 4513 |
| JHUNIV_032 | DFQH | 4514 |
| JHUNIV_033 | HFQH | 4515 |
| JHUNIV_034 | FFQH | 4516 |
| JHUNIV_035 | SFQH | 4517 |
| JHUNIV_036 | RFQH | 4518 |
| JHUNIV_037 | LFQH | 4519 |
| JHUNIV_038 | PFQH | 4520 |
| JHUNIV_039 | IFQH | 4521 |
| JHUNIV_040 | TFQH | 4522 |
| JHUNIV_041 | GFQH | 4523 |
| JHUNIV_042 | VFQH | 4524 |
| JHUNIV_043 | AFQH | 4525 |
| JHUNIV_044 | AEYFQH | 4526 |
| JHUNIV_045 | YWYFDL | 4527 |
| JHUNIV_046 | WYFDL | 4528 |
| JHUNIV_047 | YFDL | 4529 |
| JHUNIV_048 | FDL | n/a |
| JHUNIV_049 | DL | n/a |
| JHUNIV_050 | L | n/a |
| JHUNIV_051 | DWYFDL | 4530 |
| JHUNIV_052 | HWYFDL | 4531 |
| JHUNIV_053 | NWYFDL | 4532 |
| JHUNIV_054 | GYFDL | 4533 |
| JHUNIV_055 | RYFDL | 4534 |
| JHUNIV_056 | HFDL | 4535 |
| JHUNIV_057 | NFDL | 4536 |
| JHUNIV_058 | DFDL | 4537 |
| JHUNIV_059 | DAFDI | 4538 |
| JHUNIV_060 | AFDI | 4539 |
| JHUNIV_061 | FDI | n/a |
| JHUNIV_062 | DI | n/a |
| JHUNIV_063 | I | n/a |
| JHUNIV_064 | YAFDI | 4540 |
| JHUNIV_065 | HAFDI | 4541 |
| JHUNIV_066 | FAFDI | 4542 |
| JHUNIV_067 | SAFDI | 4543 |
| JHUNIV_068 | RAFDI | 4544 |
| JHUNIV_069 | LAFDI | 4545 |
| JHUNIV_070 | PAFDI | 4546 |
| JHUNIV_071 | IAFDI | 4547 |
| JHUNIV_072 | TAFDI | 4548 |
| JHUNIV_073 | GAFDI | 4549 |
| JHUNIV_074 | VAFDI | 4550 |
| JHUNIV_075 | AAFDI | 4551 |
| JHUNIV_076 | TFDI | 4552 |
| JHUNIV_077 | SFDI | 4553 |
| JHUNIV_078 | PFDI | 4554 |
| JHUNIV_079 | FFDI | 4555 |
| JHUNIV_080 | HFDI | 4556 |
| JHUNIV_081 | RFDI | 4557 |
| JHUNIV_082 | LFDI | 4558 |
| JHUNIV_083 | NFDI | 4559 |
| JHUNIV_084 | IFDI | 4560 |
| JHUNIV_085 | DFDI | 4561 |
| JHUNIV_086 | GFDI | 4562 |
| JHUNIV_087 | VFDI | 4563 |
| JHUNIV_088 | YFDI | 4564 |
| JHUNIV_089 | IDI | n/a |
| JHUNIV_090 | VDI | n/a |
| JHUNIV_091 | LDI | n/a |
| JHUNIV_092 | SDI | n/a |
| JHUNIV_093 | HDI | n/a |
| JHUNIV_094 | RDI | n/a |
| JHUNIV_095 | PDI | n/a |
| JHUNIV_096 | NDI | n/a |
| JHUNIV_097 | TDI | n/a |
| JHUNIV_098 | DDI | n/a |
| JHUNIV_099 | GDI | n/a |
| JHUNIV_100 | ADI | n/a |
| JHUNIV_101 | YDI | n/a |
| JHUNIV_102 | NAFDI | 4565 |
| JHUNIV_103 | DYFDY | 4566 |
| JHUNIV_104 | YFDY | 4567 |
| JHUNIV_105 | FDY | n/a |
| JHUNIV_106 | DY | n/a |
| JHUNIV_107 | Y | n/a |
| JHUNIV_108 | YYFDY | 4568 |
| JHUNIV_109 | HYFDY | 4569 |
| JHUNIV_110 | FYFDY | 4570 |
| JHUNIV_111 | SYFDY | 4571 |
| JHUNIV_112 | RYFDY | 4572 |
| JHUNIV_113 | LYFDY | 4573 |
| JHUNIV_114 | PYFDY | 4574 |
| JHUNIV_115 | IYFDY | 4575 |
| JHUNIV_116 | TYFDY | 4576 |
| JHUNIV_117 | GYFDY | 4577 |
| JHUNIV_118 | VYFDY | 4578 |
| JHUNIV_119 | AYFDY | 4579 |
| JHUNIV_120 | NFDY | 4580 |
| JHUNIV_121 | DFDY | 4581 |
| JHUNIV_122 | HFDY | 4582 |
| JHUNIV_123 | FFDY | 4583 |
| JHUNIV_124 | SFDY | 4584 |
| JHUNIV_125 | RFDY | 4585 |
| JHUNIV_126 | LFDY | 4586 |
| JHUNIV_127 | PFDY | 4587 |
| JHUNIV_128 | IFDY | 4588 |
| JHUNIV_129 | TFDY | 4589 |
| JHUNIV_130 | GFDY | 4590 |
| JHUNIV_131 | VFDY | 4591 |
| JHUNIV_132 | AFDY | 4592 |
| JHUNIV_133 | IDY | n/a |
| JHUNIV_134 | VDY | n/a |
| JHUNIV_135 | LDY | n/a |
| JHUNIV_136 | SDY | n/a |
| JHUNIV_137 | HDY | n/a |
| JHUNIV_138 | RDY | n/a |
| JHUNIV_139 | PDY | n/a |
| JHUNIV_140 | NDY | n/a |
| JHUNIV_141 | TDY | n/a |
| JHUNIV_142 | DDY | n/a |
| JHUNIV_143 | GDY | n/a |
| JHUNIV_144 | ADY | n/a |
| JHUNIV_145 | YDY | n/a |
| JHUNIV_146 | NYFDY | 4593 |
| JHUNIV_147 | DNWFDP | 4594 |
| JHUNIV_148 | NWFDP | 4595 |
| JHUNIV_149 | WFDP | 4596 |
| JHUNIV_150 | FDP | n/a |
| JHUNIV_151 | DP | n/a |
| JHUNIV_152 | P | n/a |
| JHUNIV_153 | YNWFDP | 4597 |
| JHUNIV_154 | HNWFDP | 4598 |
| JHUNIV_155 | FNWFDP | 4599 |
| JHUNIV_156 | SNWFDP | 4600 |
| JHUNIV_157 | RNWFDP | 4601 |
| JHUNIV_158 | LNWFDP | 4602 |
| JHUNIV_159 | PNWFDP | 4603 |
| JHUNIV_160 | INWFDP | 4604 |
| JHUNIV_161 | TNWFDP | 4605 |
| JHUNIV_162 | GNWFDP | 4606 |
| JHUNIV_163 | VNWFDP | 4607 |
| JHUNIV_164 | ANWFDP | 4608 |
| JHUNIV_165 | DWFDP | 4609 |
| JHUNIV_166 | YWFDP | 4610 |
| JHUNIV_167 | HWFDP | 4611 |
| JHUNIV_168 | FWFDP | 4612 |
| JHUNIV_169 | SWFDP | 4613 |
| JHUNIV_170 | RWFDP | 4614 |
| JHUNIV_171 | LWFDP | 4615 |
| JHUNIV_172 | PWFDP | 4616 |
| JHUNIV_173 | IWFDP | 4617 |
| JHUNIV_174 | TWFDP | 4618 |
| JHUNIV_175 | GWFDP | 4619 |
| JHUNIV_176 | VWFDP | 4620 |
| JHUNIV_177 | AWFDP | 4621 |
| JHUNIV_178 | RFDP | 4622 |
| JHUNIV_179 | GFDP | 4623 |
| JHUNIV_180 | LFDP | 4624 |
| JHUNIV_181 | SFDP | 4625 |
| JHUNIV_182 | QFDP | 4626 |
| JHUNIV_183 | PFDP | 4627 |
| JHUNIV_184 | KFDP | 4628 |
| JHUNIV_185 | MFDP | 4629 |
| JHUNIV_186 | TFDP | 4630 |
| JHUNIV_187 | EFDP | 4631 |
| JHUNIV_188 | VFDP | 4632 |
| JHUNIV_189 | AFDP | 4633 |
| JHUNIV_190 | NNWFDP | 4634 |
| JHUNIV_191 | DYYYYYGMDV | 4635 |
| JHUNIV_192 | YYYYYGMDV | 4636 |
| JHUNIV_193 | YYYYGMDV | 4637 |
| JHUNIV_194 | YYYGMDV | 4638 |
| JHUNIV_195 | YYGMDV | 4639 |
| JHUNIV_196 | YGMDV | 4640 |
| JHUNIV_197 | GMDV | 4641 |
| JHUNIV_198 | MDV | n/a |
| JHUNIV_199 | DV | n/a |
| JHUNIV_200 | V | n/a |
| JHUNIV_201 | YYYYYYGMDV | 4642 |
| JHUNIV_202 | HYYYYYGMDV | 4643 |
| JHUNIV_203 | FYYYYYGMDV | 4644 |
| JHUNIV_204 | SYYYYYGMDV | 4645 |
| JHUNIV_205 | RYYYYYGMDV | 4646 |
| JHUNIV_206 | LYYYYYGMDV | 4647 |
| JHUNIV_207 | PYYYYYGMDV | 4648 |
| JHUNIV_208 | IYYYYYGMDV | 4649 |
| JHUNIV_209 | TYYYYYGMDV | 4650 |
| JHUNIV_210 | GYYYYYGMDV | 4651 |
| JHUNIV_211 | VYYYYYGMDV | 4652 |
| JHUNIV_212 | AYYYYYGMDV | 4653 |
| JHUNIV_213 | NYYYYGMDV | 4654 |
| JHUNIV_214 | DYYYYGMDV | 4655 |
| JHUNIV_215 | HYYYYGMDV | 4656 |
| JHUNIV_216 | FYYYYGMDV | 4657 |
| JHUNIV_217 | SYYYYGMDV | 4658 |
| JHUNIV_218 | RYYYYGMDV | 4659 |
| JHUNIV_219 | LYYYYGMDV | 4660 |
| JHUNIV_220 | PYYYYGMDV | 4661 |
| JHUNIV_221 | IYYYYGMDV | 4662 |
| JHUNIV_222 | TYYYYGMDV | 4663 |
| JHUNIV_223 | GYYYYGMDV | 4664 |
| JHUNIV_224 | VYYYYGMDV | 4665 |
| JHUNIV_225 | AYYYYGMDV | 4666 |
| JHUNIV_226 | NYYYGMDV | 4667 |
| JHUNIV_227 | DYYYGMDV | 4668 |
| JHUNIV_228 | HYYYGMDV | 4669 |
| JHUNIV_229 | FYYYGMDV | 4670 |
| JHUNIV_230 | SYYYGMDV | 4671 |
| JHUNIV_231 | RYYYGMDV | 4672 |
| JHUNIV_232 | LYYYGMDV | 4673 |
| JHUNIV_233 | PYYYGMDV | 4674 |
| JHUNIV_234 | IYYYGMDV | 4675 |
| JHUNIV_235 | TYYYGMDV | 4676 |
| JHUNIV_236 | GYYYGMDV | 4677 |
| JHUNIV_237 | VYYYGMDV | 4678 |
| JHUNIV_238 | AYYYGMDV | 4679 |
| JHUNIV_239 | NYYYYYGMDV | 4680 |
| JHUNIV_240 | DYYYYYYMDV | 4681 |
| JHUNIV_241 | YYYYYYMDV | 4682 |
| JHUNIV_242 | YYYYYMDV | 4683 |
| JHUNIV_243 | YYYYMDV | 4684 |
| JHUNIV_244 | YYYMDV | 4685 |
| JHUNIV_245 | YYMDV | 4686 |
| JHUNIV_246 | YMDV | 4687 |
| JHUNIV_247 | YYYYYYYMDV | 4688 |
| JHUNIV_248 | HYYYYYYMDV | 4689 |
| JHUNIV_249 | FYYYYYYMDV | 4690 |
| JHUNIV_250 | SYYYYYYMDV | 4691 |
| JHUNIV_251 | RYYYYYYMDV | 4692 |
| JHUNIV_252 | LYYYYYYMDV | 4693 |
| JHUNIV_253 | PYYYYYYMDV | 4694 |
| JHUNIV_254 | IYYYYYYMDV | 4695 |
| JHUNIV_255 | TYYYYYYMDV | 4696 |
| JHUNIV_256 | GYYYYYYMDV | 4697 |
| JHUNIV_257 | VYYYYYYMDV | 4698 |
| JHUNIV_258 | AYYYYYYMDV | 4699 |
| JHUNIV_259 | NYYYYYMDV | 4700 |
| JHUNIV_260 | DYYYYYMDV | 4701 |
| JHUNIV_261 | HYYYYYMDV | 4702 |
| JHUNIV_262 | FYYYYYMDV | 4703 |
| JHUNIV_263 | SYYYYYMDV | 4704 |
| JHUNIV_264 | RYYYYYMDV | 4705 |
| JHUNIV_265 | LYYYYYMDV | 4706 |
| JHUNIV_266 | PYYYYYMDV | 4707 |
| JHUNIV_267 | IYYYYYMDV | 4708 |
| JHUNIV_268 | TYYYYYMDV | 4709 |
| JHUNIV_269 | GYYYYYMDV | 4710 |
| JHUNIV_270 | VYYYYYMDV | 4711 |
| JHUNIV_271 | AYYYYYMDV | 4712 |
| JHUNIV_272 | NYYYYMDV | 4713 |
| JHUNIV_273 | DYYYYMDV | 4714 |
| JHUNIV_274 | HYYYYMDV | 4715 |
| JHUNIV_275 | FYYYYMDV | 4716 |
| JHUNIV_276 | SYYYYMDV | 4717 |
| JHUNIV_277 | RYYYYMDV | 4718 |
| JHUNIV_278 | LYYYYMDV | 4719 |
| JHUNIV_279 | PYYYYMDV | 4720 |
| JHUNIV_280 | IYYYYMDV | 4721 |
| JHUNIV_281 | TYYYYMDV | 4722 |
| JHUNIV_282 | GYYYYMDV | 4723 |
| JHUNIV_283 | VYYYYMDV | 4724 |
| JHUNIV_284 | AYYYYMDV | 4725 |
| JHUNIV_285 | NYYYYYYMDV | 4726 |

TABLE 14
Twelve germline IGHJ genes and alleles.

| IGHJ Gene | DNA Sequence | SEQ ID NO |
|---|---|---|
| IGHJ1-01 | GCTGAATACTTCCAGCACTGGGGCCAGGGCACCCTGGTCACCGTCTCCTCAG | 4727 |
| IGHJ2-01 | CTACTGGTACTTCGATCTCTGGGGCCGTGGCACCCTGGTCACTGTCTCCTCAG | 4728 |
| IGHJ3-01 | ATGCTTTTGATGTCTGGGGCCAAGGGACAATGGTCACCGTCTCTTCAG | 4729 |
| IGHJ3-02 | ATGCTTTTGATATCTGGGGCCAAGGGACAATGGTCACCGTCTCTTCAG | 4730 |
| IGHJ4-01 | ACTACTTTGACTACTGGGGCCAAGGAACCCTGGTCACCGTCTCCTCAG | 4731 |
| IGHJ4-02 | ACTACTTTGACTACTGGGGCCAGGGAACCCTGGTCACCGTCTCCTCAG | 4732 |
| IGHJ4-03 | GCTACTTTGACTACTGGGGCCAAGGGACCCTGGTCACCGTCTCCTCAG | 4733 |
| IGHJ5-01 | ACAACTGGTTCGACTCCTGGGGCCAAGGAACCCTGGTCACCGTCTCCTCAG | 4734 |
| IGHJ5-02 | ACAACTGGTTCGACCCCTGGGGCCAGGGAACCCTGGTCACCGTCTCCTCAG | 4735 |
| IGHJ6-01 | ATTACTACTACTACTACGGTATGGACGTCTGGGGGCAAGGGACCACGGTCACCGTCT | 4736 |
| | CCTCAG | |
| IGHJ6-02 | ATTACTACTACTACTACGGTATGGACGTCTGGGGCCAAGGGACCACGGTCACCGTCT | 4737 |
| | CCTCAG | |
| IGHJ6-03 | ATTACTACTACTACTACTACATGGACGTCTGGGGCAAAGGGACCACGGTCACCGTCT | 4738 |
| | CCTCAG | |

TABLE 15
Theoretical segment pool of 248 parent
H3-JH segments.

| H3-JH | | |
|---|---|---|
| Parent | | |
| Segment | Amino Acid | |
| Name | Sequence | SEQ ID NO |
| JHparent001 | ADI | n/a |
| JHparent002 | ADY | n/a |
| JHparent003 | DDI | n/a |
| JHparent004 | DDY | n/a |
| JHparent005 | GDI | n/a |
| JHparent006 | GDY | n/a |
| JHparent007 | HDI | n/a |
| JHparent008 | HDY | n/a |
| JHparent009 | IDI | n/a |
| JHparent010 | IDY | n/a |
| JHparent011 | LDI | n/a |
| JHparent012 | LDY | n/a |
| JHparent013 | NDI | n/a |
| JHparent014 | NDY | n/a |
| JHparent015 | PDI | n/a |
| JHparent016 | PDY | n/a |
| JHparent017 | RDI | n/a |
| JHparent018 | RDY | n/a |
| JHparent019 | SDI | n/a |
| JHparent020 | SDY | n/a |
| JHparent021 | TDI | n/a |
| JHparent022 | TDY | n/a |
| JHparent023 | VDI | n/a |
| JHparent024 | VDY | n/a |
| JHparent025 | YDI | n/a |
| JHparent026 | YDY | n/a |
| JHparent027 | AFDP | 4633 |
| JHparent028 | AFDY | 4592 |
| JHparent029 | AFQH | 4525 |
| JHparent030 | DFDI | 4561 |
| JHparent031 | DFDL | 4537 |
| JHparent032 | DFDY | 4581 |
| JHparent033 | DFQH | 4514 |
| JHparent034 | EFDP | 4631 |
| JHparent035 | FFDI | 4555 |
| JHparent036 | FFDY | 4583 |
| JHparent037 | FFQH | 4516 |
| JHparent038 | GFDI | 4562 |
| JHparent039 | GFDP | 4623 |
| JHparent040 | GFDY | 4590 |
| JHparent041 | GFQH | 4523 |
| JHparent042 | HFDI | 4556 |
| JHparent043 | HFDL | 4535 |
| JHparent044 | HFDY | 4582 |
| JHparent045 | HFQH | 4515 |
| JHparent046 | IFDI | 4560 |
| JHparent047 | IFDY | 4588 |
| JHparent048 | IFQH | 4521 |
| JHparent049 | KFDP | 4628 |
| JHparent050 | LFDI | 4558 |
| JHparent051 | LFDP | 4624 |
| JHparent052 | LFDY | 4586 |
| JHparent053 | LFQH | 4519 |
| JHparent054 | MFDP | 4629 |
| JHparent055 | NFDI | 4559 |
| JHparent056 | NFDL | 4536 |
| JHparent057 | NFDY | 4580 |
| JHparent058 | NFQH | 4513 |
| JHparent059 | PFDI | 4554 |
| JHparent060 | PFDP | 4627 |
| JHparent061 | PFDY | 4587 |
| JHparent062 | PFQH | 4520 |
| JHparent063 | QFDP | 4626 |
| JHparent064 | RFDI | 4557 |
| JHparent065 | RFDP | 4622 |
| JHparent066 | RFDY | 4585 |
| JHparent067 | RFQH | 4518 |
| JHparent068 | SFDI | 4553 |
| JHparent069 | SFDP | 4625 |
| JHparent070 | SFDY | 4584 |
| JHparent071 | SFQH | 4517 |
| JHparent072 | TFDI | 4552 |
| JHparent073 | TFDP | 4630 |
| JHparent074 | TFDY | 4589 |
| JHparent075 | TFQH | 4522 |
| JHparent076 | VFDI | 4563 |
| JHparent077 | VFDP | 4632 |
| JHparent078 | VFDY | 4591 |
| JHparent079 | VFQH | 4524 |
| JHparent080 | YFDI | 4564 |
| JHparent081 | YFDL | 4529 |
| JHparent082 | AAFDI | 4551 |
| JHparent083 | AWFDP | 4621 |
| JHparent084 | AYFDY | 4579 |
| JHparent085 | AYFQH | 4512 |
| JHparent086 | DAFDI | 4538 |
| JHparent087 | DWFDP | 4609 |
| JHparent088 | DYFDY | 4566 |
| JHparent089 | FAFDI | 4542 |
| JHparent090 | FWFDP | 4612 |
| JHparent091 | FYFDY | 4570 |
| JHparent092 | GAFDI | 4549 |
| JHparent093 | GWFDP | 4619 |
| JHparent094 | GYFDL | 4533 |
| JHparent095 | GYFDY | 4577 |
| JHparent096 | GYFQH | 4510 |
| JHparent097 | HAFDI | 4541 |
| JHparent098 | HWFDP | 4611 |
| JHparent099 | HYFDY | 4569 |
| JHparent100 | IAFDI | 4547 |
| JHparent101 | IWFDP | 4617 |
| JHparent102 | IYFDY | 4575 |
| JHparent103 | IYFQH | 4508 |
| JHparent104 | KYFQH | 4502 |
| JHparent105 | LAFDI | 4545 |
| JHparent106 | LWFDP | 4615 |
| JHparent107 | LYFDY | 4573 |
| JHparent108 | LYFQH | 4504 |
| JHparent109 | NAFDI | 4565 |
| JHparent110 | NYFDY | 4593 |
| JHparent111 | PAFDI | 4546 |
| JHparent112 | PWFDP | 4616 |
| JHparent113 | PYFDY | 4574 |
| JHparent114 | PYFQH | 4507 |
| JHparent115 | QYFQH | 4503 |
| JHparent116 | RAFDI | 4544 |
| JHparent117 | RWFDP | 4614 |
| JHparent118 | RYFDL | 4534 |
| JHparent119 | RYFDY | 4572 |
| JHparent120 | RYFQH | 4506 |
| JHparent121 | SAFDI | 4543 |
| JHparent122 | SWFDP | 4613 |
| JHparent123 | SYFDY | 4571 |
| JHparent124 | SYFQH | 4505 |
| JHparent125 | TAFDI | 4548 |
| JHparent126 | TWFDP | 4618 |
| JHparent127 | TYFDY | 4576 |
| JHparent128 | TYFQH | 4509 |
| JHparent129 | VAFDI | 4550 |
| JHparent130 | VWFDP | 4620 |
| JHparent131 | VYFDY | 4578 |
| JHparent132 | VYFQH | 4511 |
| JHparent133 | WYFDL | 4528 |
| JHparent134 | YAFDI | 4540 |
| JHparent135 | YWFDP | 4610 |
| JHparent136 | YYFDY | 4568 |
| JHparent137 | AEYFQH | 4526 |
| JHparent138 | ANWFDP | 4608 |
| JHparent139 | DEYFQH | 4498 |
| JHparent140 | DNWFDP | 4594 |
| JHparent141 | DWYFDL | 4530 |
| JHparent142 | FEYFQH | 4492 |
| JHparent143 | FNWFDP | 4599 |
| JHparent144 | GEYFQH | 4499 |
| JHparent145 | GNWFDP | 4606 |
| JHparent146 | HEYFQH | 4493 |
| JHparent147 | HNWFDP | 4598 |
| JHparent148 | HWYFDL | 4531 |
| JHparent149 | IEYFQH | 4497 |
| JHparent150 | INWFDP | 4604 |
| JHparent151 | LEYFQH | 4495 |
| JHparent152 | LNWFDP | 4602 |
| JHparent153 | NEYFQH | 4496 |
| JHparent154 | NNWFDP | 4634 |
| JHparent155 | NWYFDL | 4532 |
| JHparent156 | PEYFQH | 4491 |
| JHparent157 | PNWFDP | 4603 |
| JHparent158 | REYFQH | 4494 |
| JHparent159 | RNWFDP | 4601 |
| JHparent160 | SEYFQH | 4490 |
| JHparent161 | SNWFDP | 4600 |
| JHparent162 | TEYFQH | 4487 |
| JHparent163 | TNWFDP | 4605 |
| JHparent164 | VEYFQH | 4500 |
| JHparent165 | VNWFDP | 4607 |
| JHparent166 | YEYFQH | 4501 |
| JHparent167 | YNWFDP | 4597 |
| JHparent168 | YWYFDL | 4527 |
| JHparent169 | AYYYGMDV | 4679 |
| JHparent170 | AYYYYMDV | 4725 |
| JHparent171 | DYYYGMDV | 4668 |
| JHparent172 | DYYYYMDV | 4714 |
| JHparent173 | FYYYGMDV | 4670 |
| JHparent174 | FYYYYMDV | 4716 |
| JHparent175 | GYYYGMDV | 4677 |
| JHparent176 | GYYYYMDV | 4723 |
| JHparent177 | HYYYGMDV | 4669 |
| JHparent178 | HYYYYMDV | 4715 |
| JHparent179 | IYYYGMDV | 4675 |
| JHparent180 | IYYYYMDV | 4721 |
| JHparent181 | LYYYGMDV | 4673 |
| JHparent182 | LYYYYMDV | 4719 |
| JHparent183 | NYYYGMDV | 4667 |
| JHparent184 | NYYYYMDV | 4713 |
| JHparent185 | PYYYGMDV | 4674 |
| JHparent186 | PYYYYMDV | 4720 |
| JHparent187 | RYYYGMDV | 4672 |
| JHparent188 | RYYYYMDV | 4718 |
| JHparent189 | SYYYGMDV | 4671 |
| JHparent190 | SYYYYMDV | 4717 |
| JHparent191 | TYYYGMDV | 4676 |
| JHparent192 | TYYYYMDV | 4722 |
| JHparent193 | VYYYGMDV | 4678 |
| JHparent194 | VYYYYMDV | 4724 |
| JHparent195 | AYYYYGMDV | 4666 |
| JHparent196 | AYYYYYMDV | 4712 |
| JHparent197 | DYYYYGMDV | 4655 |
| JHparent198 | DYYYYYMDV | 4701 |
| JHparent199 | FYYYYGMDV | 4657 |
| JHparent200 | FYYYYYMDV | 4703 |
| JHparent201 | GYYYYGMDV | 4664 |
| JHparent202 | GYYYYYMDV | 4710 |
| JHparent203 | HYYYYGMDV | 4656 |
| JHparent204 | HYYYYYMDV | 4702 |
| JHparent205 | IYYYYGMDV | 4662 |
| JHparent206 | IYYYYYMDV | 4708 |
| JHparent207 | LYYYYGMDV | 4660 |
| JHparent208 | LYYYYYMDV | 4706 |
| JHparent209 | NYYYYGMDV | 4654 |
| JHparent210 | NYYYYYMDV | 4700 |
| JHparent211 | PYYYYGMDV | 4661 |
| JHparent212 | PYYYYYMDV | 4707 |
| JHparent213 | RYYYYGMDV | 4659 |
| JHparent214 | RYYYYYMDV | 4705 |
| JHparent215 | SYYYYGMDV | 4658 |
| JHparent216 | SYYYYYMDV | 4704 |
| JHparent217 | TYYYYGMDV | 4663 |
| JHparent218 | TYYYYYMDV | 4709 |
| JHparent219 | VYYYYGMDV | 4665 |
| JHparent220 | VYYYYYMDV | 4711 |
| JHparent221 | AYYYYYGMDV | 4653 |
| JHparent222 | AYYYYYYMDV | 4699 |
| JHparent223 | DYYYYYGMDV | 4635 |
| JHparent224 | DYYYYYYMDV | 4681 |
| JHparent225 | FYYYYYGMDV | 4644 |
| JHparent226 | FYYYYYYMDV | 4690 |
| JHparent227 | GYYYYYGMDV | 4651 |
| JHparent228 | GYYYYYYMDV | 4697 |
| JHparent229 | HYYYYYGMDV | 4643 |
| JHparent230 | HYYYYYYMDV | 4689 |
| JHparent231 | IYYYYYGMDV | 4649 |
| JHparent232 | IYYYYYYMDV | 4695 |
| JHparent233 | LYYYYYGMDV | 4647 |
| JHparent234 | LYYYYYYMDV | 4693 |
| JHparent235 | NYYYYYGMDV | 4680 |
| JHparent236 | NYYYYYYMDV | 4726 |
| JHparent237 | PYYYYYGMDV | 4648 |
| JHparent238 | PYYYYYYMDV | 4694 |
| JHparent239 | RYYYYYGMDV | 4646 |
| JHparent240 | RYYYYYYMDV | 4692 |
| JHparent241 | SYYYYYGMDV | 4645 |
| JHparent242 | SYYYYYYMDV | 4691 |
| JHparent243 | TYYYYYGMDV | 4650 |
| JHparent244 | TYYYYYYMDV | 4696 |
| JHparent245 | VYYYYYGMDV | 4652 |
| JHparent246 | VYYYYYYMDV | 4698 |
| JHparent247 | YYYYYYGMDV | 4642 |
| JHparent248 | YYYYYYYMDV | 4688 |

TABLE 16
Polynucleotide sequences of 27 human IGHD
genes and alleles.

| IGHD Gene | Polynucleotide Sequence | SEQ ID NO |
|---|---|---|
| IGHD1-(1)-01 | GGTACAACTGGAACGAC | 4739 |
| IGHD1-20 | GGTATAACTGGAACGAC | 4740 |
| IGHD1-26 | GGTATAGTGGGAGCTACTAC | 4741 |
| IGHD1-7 | GGTATAACTGGAACTAC | 4742 |
| IGHD2-15-01 | AGGATATTGTAGTGGTGGTAGCTGCTACTCC | 4743 |
| IGHD2-2-x | AGGATATTGTAGTAGTACCAGCTGCTATGCC | 4744 |
| IGHD2-2-y | AGGATATTGTAGTAGTACCAGCTGCTATACC | 4745 |
| IGHD2-2-z | TGGATATTGTAGTAGTACCAGCTGCTATGCC | 4746 |
| IGHD2-21-01 | AGCATATTGTGGTGGTGATTGCTATTCC | 4747 |
| IGHD2-21-02 | AGCATATTGTGGTGGTGACTGCTATTCC | 4748 |
| IGHD2-8-01 | AGGATATTGTACTAATGGTGTATGCTATACC | 4749 |
| IGHD3-10-01 | GTATTACTATGGTTCGGGGAGTTATTATAAC | 4750 |
| IGHD3-10-03 | GTATTACTATGGTTCAGGGAGTTATTATAAC | 4751 |
| IGHD3-16-02 | GTATTATGATTACGTTTGGGGGAGTTATGCTTATACC | 4752 |
| IGHD3-22-01 | GTATTACTATGATAGTAGTGGTTATTACTAC | 4753 |
| IGHD3-3-01 | GTATTACGATTTTTGGAGTGGTTATTATACC | 4754 |
| IGHD3-9-01 | GTATTACGATATTTTGACTGGTTATTATAAC | 4755 |
| IGHD4-17 | TGACTACGGTGACTAC | 4756 |
| IGHD4-23-01 | TGACTACGGTGGTAACTCC | 4757 |
| IGHD4-4/11- | TGACTACAGTAACTAC | 4758 |
| 01 | | |
| IGHD5-12-01 | GTGGATATAGTGGCTACGATTAC | 4759 |
| IGHD5-24-01 | GTAGAGATGGCTACAATTAC | 4760 |
| IGHD5-5/18- | GTGGATACAGCTATGGTTAC | 4761 |
| 01 | | |
| IGHD6-13-01 | GGGTATAGCAGCAGCTGGTAC | 4762 |
| IGHD6-19-01 | GGGTATAGCAGTGGCTGGTAC | 4763 |
| IGHD6-6-01 | GAGTATAGCAGCTCGTCC | 4764 |
| IGHD7-27-01 | CTAACTGGGGA | 4765 |

TABLE 17
Theoretical segment pool of 73 DH parent
Segments. “Z” represents a stop codon.
DH Parent

| Segment | Amino Acid | |
|---|---|---|
| Name | Sequence | SEQ ID NO |
| DHparent001 | LTG | n/a |
| DHparent002 | NWG | n/a |
| DHparent003 | ZLG | n/a |
| DHparent004 | DYGDY | 4348 |
| DHparent005 | DYSNY | 4366 |
| DHparent006 | TTVTT | 4351 |
| DHparent007 | VQLER | 3737 |
| DHparent008 | VZLEL | 4766 |
| DHparent009 | VZLER | 4767 |
| DHparent010 | VZQLV | 4768 |
| DHparent011 | YNWND | 3740 |
| DHparent012 | YNWNY | 3765 |
| DHparent013 | ZLQZL | 4769 |
| DHparent014 | ZLRZL | 4770 |
| DHparent015 | DYGGNS | 4354 |
| DHparent016 | EYSSSS | 4476 |
| DHparent017 | GITGTT | 3743 |
| DHparent018 | GTTGTT | 3731 |
| DHparent019 | GYSYGY | 4429 |
| DHparent020 | RDGYNY | 4407 |
| DHparent021 | SIAARP | 4481 |
| DHparent022 | TTVVTP | 4360 |
| DHparent023 | VZQQLV | 4771 |
| DHparent024 | VZQWLV | 4772 |
| DHparent025 | VZWELL | 4773 |
| DHparent026 | WIQLWL | 4423 |
| DHparent027 | YSGSYY | 3759 |
| DHparent028 | ZLRWZL | 4774 |
| DHparent029 | ZRWLQL | 4775 |
| DHparent030 | GIAAAGT | 4445 |
| DHparent031 | GIAVAGT | 4465 |
| DHparent032 | GIVGATT | 3748 |
| DHparent033 | GYSGYDY | 4385 |
| DHparent034 | GYSSGWY | 4456 |
| DHparent035 | GYSSSWY | 4435 |
| DHparent036 | VDTAMVT | 4413 |
| DHparent037 | VEMATIT | 4395 |
| DHparent038 | WIZWLRL | 4776 |
| DHparent039 | VDIVATIT | 4369 |
| DHparent040 | AYCGGDCYS | 3862 |
| DHparent041 | HIVVVIAIP | 3871 |
| DHparent042 | HIVVVTAIP | 3891 |
| DHparent043 | SILWWZLLF | 4777 |
| DHparent044 | DIVLMVYAIP | 3920 |
| DHparent045 | DIVVVPAAIP | 3846 |
| DHparent046 | DIVVVPAAMP | 3816 |
| DHparent047 | DIVVVVAATP | 3777 |
| DHparent048 | GYCSGGSCYS | 3767 |
| DHparent049 | GYCSSTSCYA | 3806 |
| DHparent050 | GYCSSTSCYT | 3843 |
| DHparent051 | GYCTNGVCYT | 3910 |
| DHparent052 | ITIFGVVIIP | 4269 |
| DHparent053 | ITIFZLVIIT | 4778 |
| DHparent054 | ITMIVVVITT | 4189 |
| DHparent055 | ITMVQGVIIT | 4040 |
| DHparent056 | ITMVRGVIIT | 3994 |
| DHparent057 | RILYZWCMLY | 4779 |
| DHparent058 | RILZWWZLLL | 4780 |
| DHparent059 | RILZZYQLLC | 4781 |
| DHparent060 | RILZZYQLLY | 4782 |
| DHparent061 | VLLWFGELLZ | 4783 |
| DHparent062 | VLLWFRELLZ | 4784 |
| DHparent063 | VLLZZZWLLL | 4785 |
| DHparent064 | VLRFLEWLLY | 4214 |
| DHparent065 | VLRYFDWLLZ | 4786 |
| DHparent066 | WILZZYQLLC | 4787 |
| DHparent067 | YYDFWSGYYT | 4242 |
| DHparent068 | YYDILTGYYN | 4318 |
| DHparent069 | YYYDSSGYYY | 4161 |
| DHparent070 | YYYGSGSYYN | 3969 |
| DHparent071 | IMITFGGVMLIP | 4115 |
| DHparent072 | VLZLRLGELCLY | 4788 |
| DHparent073 | YYDYVWGSYAYT | 4070 |

TABLE 18
Application of Equation 1 to Test Case 1.

| Type | Segment | Weight |
|---|---|---|
| TN1 | R | 1.0 |
| DH | TA | 1.0 |
| N2 | H | 1.0 |
| H3-JH | HFDY | 1.0 |

TABLE 19
Application of Equation 1 to Test Cases 2.1 and 2.1.

| Type | Segment | Weight |
|---|---|---|
| TN1 | V and VG | 0.5 each |
| DH | GIVGA and IVGA | 0.5 each |
| N2 | AS | 1.0 |
| H3-JH | Y | 1.0 |

TABLE 20
Application of Equation 1 to Test Case 3.1.

| Type | Segment | Weight |
|---|---|---|
| TN1 | DR | 1.0 |
| DH | YSGYD | 0.8 |
| N2 | LG | 1.0 |
| H3-JH | Y | 1.0 |

TABLE 21
Application of Equation 1 to Test Cases 4.1 and 4.2.

| Type | Segment | Weight |
|---|---|---|
| TN1 | “—” and G | 0.5 each |
| DH | GIAAA and IAAA | 0.5 each |
| N2 | D | 1.0 |
| H3-JH | SNWFDP | 0.83 |

TABLE 22
Application of Equation 1 to all Test Cases.

| Type | Segments | Weight |
|---|---|---|
| TN1 | DR, R, VG, V, G and “—” | 0.25, 0.25, 0.125, |
| | | 0.125, 0.125 and 0.125 |
| | | respectively |
| DH | TA, YSGYD, IAAA, | 0.25, 0.20, 0.125, |
| | GIAAA, IVGA and GIVGA | 0.125, 0.125 and 0.125 |
| | | respectively |
| N2 | AS, H, D and LG | 0.25 each |
| H3-JH | Y, HFDY and SNWFDP | 0.50, 0.25 and 0.209 |

TABLE 23
Segments used in Exemplary Library Design 1 (ELD-1).
The sequences collectively form a theoretical segment
pool that comprises individual theoretical segment
pools of TN1, DH, N2, and H3-JH segments.

| Segment | | SEQ | | SEQ | | | SEQ |
|---|---|---|---|---|---|---|---|
| No. | TN1 | ID NO | DH | ID NO | N2 | H3-JH | ID NO |
| 1 | — | n/a | YYYDSSGYY | 4162 | — | DAFDI | 4538 |
| 2 | G | n/a | YGDY | 4350 | Y | YYFDY | 4568 |
| 3 | D | n/a | DYGDY | 4348 | G | Y | n/a |
| 4 | A | n/a | YYYDSSGY | 4164 | D | FDY | n/a |
| 5 | V | n/a | YCSSTSCY | 3810 | S | DY | n/a |
| 6 | DR | n/a | YYDSSGY | 4168 | P | YGMDV | 4640 |
| 7 | S | n/a | YCSGGSCY | 3771 | F | — | n/a |
| 8 | L | n/a | YCSSTSC | 3812 | L | LDY | n/a |
| 9 | DL | n/a | GG | n/a | A | GAFDI | 4549 |
| 10 | R | n/a | RG | n/a | E | YFDY | 4567 |
| 11 | GR | n/a | SGSY | 3763 | V | YYGMDV | 4639 |
| 12 | T | n/a | YYDSSGYY | 4165 | H | AFDI | 4539 |
| 13 | GG | n/a | SS | n/a | T | PFDY | 4587 |
| 14 | E | n/a | YDFWSGY | 4249 | R | GMDV | 4641 |
| 15 | DS | n/a | GYCSSTSC | 3809 | W | GWFDP | 4619 |
| 16 | VG | n/a | DY | n/a | SG | YYYYGMDV | 4637 |
| 17 | DG | n/a | YYYDSSG | 4167 | I | IDY | n/a |
| 18 | AP | n/a | CSSTSCY | 3813 | RG | GYFDY | 4577 |
| 19 | GL | n/a | YYDFWSGY | 4245 | K | GFDY | 4590 |
| 20 | GS | n/a | SSGWY | 4461 | LG | MDV | n/a |
| 21 | DRG | n/a | AG | n/a | Q | VDY | n/a |
| 22 | DLG | n/a | DSSGY | 4179 | GP | YYYGMDV | 4638 |
| 23 | VP | n/a | SSSW | 4443 | PG | NWFDP | 4595 |
| 24 | DP | n/a | VGAT | 3756 | LP | PDY | n/a |
| 25 | P | n/a | SY | n/a | AG | WFDP | 4596 |
| 26 | EG | n/a | DTAM | 4420 | GS | NFDY | 4580 |
| 27 | GA | n/a | IAAAG | 4449 | TS | YWYFDL | 4527 |
| 28 | AG | n/a | YSSSW | 4439 | SS | NAFDI | 4565 |
| 29 | GV | n/a | GS | n/a | GG | HFDY | 4582 |
| 30 | GP | n/a | YYDSSG | 4172 | YS | SFDY | 4584 |
| 31 | ER | n/a | VG | n/a | M | YYYYYGMDV | 4636 |
| 32 | DV | n/a | YSSSWY | 4437 | SL | DYYYGMDV | 4668 |
| 33 | VGG | n/a | YCSGGSC | 3773 | SP | DFDY | 4581 |
| 34 | SG | n/a | YDSSGYY | 4169 | SD | YNWFDP | 4597 |
| 35 | GRG | n/a | GI | n/a | AP | DYYYYGMDV | 4655 |
| 36 | DA | n/a | GYCSGGSCY | 3768 | GR | YYYMDV | 4685 |
| 37 | DRP | n/a | YSSS | 4442 | TG | LFDY | 4586 |
| 38 | DSG | n/a | SSGW | 4463 | SR | DYFDY | 4566 |
| 39 | GPR | n/a | TA | n/a | LD | NYYYYGMDV | 4654 |
| 40 | DT | n/a | DSSGYY | 4174 | LS | GDY | n/a |
| 41 | GGG | n/a | GYCSSTSCY | 3807 | GA | YDY | n/a |
| 42 | DRGG | 3720 | TTVT | 4352 | VG | SYFDY | 4571 |
| 43 | PL | n/a | YSSGWY | 4458 | PP | YYMDV | 4686 |
| 44 | DPS | n/a | GW | n/a | RR | TFDY | 4589 |
| 45 | LP | n/a | LG | n/a | GSG | YYYYYYGMDV | 4642 |
| 46 | RG | n/a | DYGD | 4349 | GT | FFDY | 4583 |
| 47 | GT | n/a | TVTT | 4353 | TP | SYYYYGMDV | 4658 |
| 48 | LG | n/a | AAA | n/a | RP | VFDY | 4591 |
| 49 | DLP | n/a | YSSGW | 4460 | RD | YAFDI | 4540 |
| 50 | DGR | n/a | LV | n/a | QL | SDY | n/a |
| 51 | ERG | n/a | YYDFWSGYY | 4243 | TT | WYFDL | 4528 |
| 52 | DGS | n/a | YYDSSGYYY | 4163 | PL | DWFDP | 4609 |
| 53 | ES | n/a | YYDFWSG | 4248 | RS | AFDY | 4592 |
| 54 | PS | n/a | YGD | n/a | WS | PYYYYGMDV | 4661 |
| 55 | GGS | n/a | YG | n/a | RV | HYFDY | 4569 |
| 56 | DPR | n/a | GT | n/a | RF | DV | n/a |
| 57 | EA | n/a | YSGSY | 3760 | SF | RFDY | 4585 |
| 58 | GGR | n/a | YYYGSGSY | 3972 | PT | NYFDY | 4593 |
| 59 | DGG | n/a | LR | n/a | PS | IFDY | 4588 |
| 60 | SP | n/a | SSS | n/a | AT | ADY | n/a |
| 61 | DPG | n/a | GD | n/a | RL | HYYYGMDV | 4669 |
| 62 | DSGG | 3723 | CSGGSCY | 3774 | SV | GYYYYYGMDV | 4651 |
| 63 | DPL | n/a | GY | n/a | RA | DWYFDL | 4530 |
| 64 | TP | n/a | YCGGDCY | 3866 | GRG | GYYYGMDV | 4677 |
| 65 | AGG | n/a | QWLV | 4475 | VP | YYYYMDV | 4684 |
| 66 | PR | n/a | IAAA | 4452 | SQ | V | n/a |
| 67 | DGT | n/a | QG | n/a | AS | FDP | n/a |
| 68 | GLG | n/a | YCSSTSCYT | 3844 | PR | DDY | n/a |
| 69 | DSP | n/a | SG | n/a | VD | GYYYYGMDV | 4664 |
| 70 | GGV | n/a | TTVTT | 4351 | GV | YMDV | 4687 |
| 71 | GPS | n/a | QQL | n/a | LT | NWYFDL | 4532 |
| 72 | GVG | n/a | IAVA | 4472 | TR | PYFDY | 4574 |
| 73 | GGA | n/a | GDY | n/a | VS | FDI | n/a |
| 74 | RP | n/a | YYYDSSGYYY | 4161 | SGL | NDY | n/a |
| 75 | DPP | n/a | DGYN | 4411 | RGG | HYYYYYGMDV | 4643 |
| 76 | DPT | n/a | CSSTSC | 3814 | LR | VYYYGMDV | 4678 |
| 77 | EV | n/a | IVVVPAAI | 3849 | SGG | VYFDY | 4578 |
| 78 | GAP | n/a | AVAG | 4473 | SA | SNWFDP | 4600 |
| 79 | DGRG | 3702 | AA | n/a | AY | NYYYGMDV | 4667 |
| 80 | GPP | n/a | DSSG | 4185 | LE | LYYYYGMDV | 4660 |
| 81 | DLGG | 3714 | VR | n/a | TGG | DYYYYYGMDV | 4635 |
| 82 | ET | n/a | YDFWSG | 4253 | GL | AAFDI | 4551 |
| 83 | DGGP | 3681 | GYSSSWY | 4435 | GAG | SWFDP | 4613 |
| 84 | DGGR | 3684 | SGW | n/a | TA | SYYYYYGMDV | 4645 |
| 85 | DGSG | 3705 | WG | n/a | IS | SYYYGMDV | 4671 |
| 86 | GTG | n/a | SGSYY | 3761 | ST | P | n/a |
| 87 | DPGG | 3717 | RY | n/a | SSE | YYYYYMDV | 4683 |
| 88 | DGGS | 3687 | DS | n/a | GLG | RAFDI | 4544 |
| 89 | GGT | n/a | TT | n/a | PRP | RYFDY | 4572 |
| 90 | GGRG | 3703 | YCSGGSCYS | 3769 | RPL | FYYYYGMDV | 4657 |
| 91 | EGR | n/a | PA | n/a | EA | GNWFDP | 4606 |
| 92 | DGA | n/a | IVVVPAA | 3823 | LGG | RWFDP | 4614 |
| 93 | DGL | n/a | IAAAGT | 4447 | FS | GFDP | 4623 |
| 94 | EL | n/a | AAAG | 4453 | DL | DYYYYMDV | 4714 |
| 95 | EGG | n/a | GYCSGGSC | 3770 | GGG | PYYYGMDV | 4674 |
| 96 | LGG | n/a | SGWY | 4464 | AR | DP | n/a |
| 97 | DPA | n/a | DYGGN | 4355 | RE | HAFDI | 4541 |
| 98 | EGV | n/a | YYYDS | 4176 | PA | DNWFDP | 4594 |
| 99 | GSG | n/a | YSSG | 4462 | PTQ | LNWFDP | 4602 |
| 100 | GGP | n/a | YDSSGY | 4173 | AGG | AYYYYGMDV | 4666 |
| 101 | | | VAG | n/a | GGV | | |
| 102 | | | SSW | n/a | SI | | |
| 103 | | | GSGSY | 3987 | SAA | | |
| 104 | | | SSSS | 4480 | GGS | | |
| 105 | | | NW | n/a | GGA | | |
| 106 | | | DFWSGY | 4254 | GPG | | |
| 107 | | | QQLV | 4455 | PGG | | |
| 108 | | | YGGN | 4358 | AAE | | |
| 109 | | | YDSSG | 4178 | GGR | | |
| 110 | | | GYSYG | 4430 | TW | | |
| 111 | | | TV | n/a | GGP | | |
| 112 | | | NG | n/a | GGL | | |
| 113 | | | IVGAT | 3752 | VGG | | |
| 114 | | | IVGA | 3755 | GTG | | |
| 115 | | | YGSGSY | 3981 | NR | | |
| 116 | | | SSWY | 4444 | NTP | | |
| 117 | | | ST | n/a | PV | | |
| 118 | | | DFWSGYY | 4250 | EK | | |
| 119 | | | GSY | n/a | GVG | | |
| 120 | | | YYDSS | 4177 | KV | | |
| 121 | | | VGA | n/a | EKR | | |
| 122 | | | AT | n/a | QT | | |
| 123 | | | RP | n/a | SE | | |
| 124 | | | YYYGSGS | 3975 | SAL | | |
| 125 | | | GIAAAG | 4446 | FH | | |
| 126 | | | SGY | n/a | RH | | |
| 127 | | | TG | n/a | PTA | | |
| 128 | | | LT | n/a | HL | | |
| 129 | | | RD | n/a | WGT | | |
| 130 | | | WEL | n/a | REL | | |
| 131 | | | YSYG | 4433 | NT | | |
| 132 | | | TVT | n/a | HW | | |
| 133 | | | GYCSGGSCYS | 3767 | PKS | | |
| 134 | | | AR | n/a | DT | | |
| 135 | | | YYGSGSY | 3976 | DTL | | |
| 136 | | | RW | n/a | SK | | |
| 137 | | | DIVVVPA | 3822 | TGL | | |
| 138 | | | YSGS | 3762 | AYH | | |
| 139 | | | GYSSSW | 4436 | ISR | | |
| 140 | | | YSSSS | 4478 | GGT | | |
| 141 | | | YYYDSS | 4171 | QE | | |
| 142 | | | QL | n/a | | | |
| 143 | | | GYSGYD | 4386 | | | |
| 144 | | | GE | n/a | | | |
| 145 | | | MA | n/a | | | |
| 146 | | | DSS | n/a | | | |
| 147 | | | RF | n/a | | | |
| 148 | | | DTAMV | 4417 | | | |
| 149 | | | YYGSGSYY | 3973 | | | |
| 150 | | | VDTAMV | 4414 | | | |
| 151 | | | FGVV | 4293 | | | |
| 152 | | | EYSSS | 4477 | | | |
| 153 | | | TTV | n/a | | | |
| 154 | | | SWY | n/a | | | |
| 155 | | | IAARP | 4483 | | | |
| 156 | | | VE | n/a | | | |
| 157 | | | SIAA | 4484 | | | |
| 158 | | | YSGYD | 4389 | | | |
| 159 | | | DIVVVPAA | 3819 | | | |
| 160 | | | CSGGSC | 3775 | | | |
| 161 | | | DW | n/a | | | |
| 162 | | | TS | n/a | | | |
| 163 | | | RL | n/a | | | |
| 164 | | | YSS | n/a | | | |
| 165 | | | GN | n/a | | | |
| 166 | | | SN | n/a | | | |
| 167 | | | GYSY | 4432 | | | |
| 168 | | | YYDS | 4183 | | | |
| 169 | | | VDTAM | 4416 | | | |
| 170 | | | LE | n/a | | | |
| 171 | | | AVAGT | 4470 | | | |
| 172 | | | YSY | n/a | | | |
| 173 | | | SW | n/a | | | |
| 174 | | | SSG | n/a | | | |
| 175 | | | FGV | n/a | | | |
| 176 | | | VP | n/a | | | |
| 177 | | | VA | n/a | | | |
| 178 | | | SYY | n/a | | | |
| 179 | | | QWL | n/a | | | |
| 180 | | | GSG | n/a | | | |
| 181 | | | TIFGVV | 4280 | | | |
| 182 | | | AVA | n/a | | | |
| 183 | | | FWSGY | 4260 | | | |
| 184 | | | YSGSYY | 3759 | | | |
| 185 | | | IAVAG | 4469 | | | |
| 186 | | | YS | n/a | | | |
| 187 | | | YQL | n/a | | | |
| 188 | | | SIAAR | 4482 | | | |
| 189 | | | YCGGDC | 3868 | | | |
| 190 | | | NWNY | 3766 | | | |
| 191 | | | SSSWY | 4440 | | | |
| 192 | | | GIAVA | 4468 | | | |
| 193 | | | YSYGY | 4431 | | | |
| 194 | | | GIAAA | 4448 | | | |
| 195 | | | YYG | n/a | | | |
| 196 | | | AAG | n/a | | | |
| 197 | | | AV | n/a | | | |
| 198 | | | AYCGGDCY | 3863 | | | |
| 199 | | | YYGSGS | 3980 | | | |
| 200 | | | EY | n/a | | | |

TABLE 24
Segments used in Exemplary Library Design 2 (ELD-2).
The sequences collectively form a theoretical segment
pool that comprises individual theoretical segment pools
of TN1, DH, N2, and H3-JH segments.

| Segment | | SEQ | | SEQ | | SEQ | | SEQ |
|---|---|---|---|---|---|---|---|---|
| No. | TN1 | ID NO | DH | ID NO | N2 | ID NO | H3-JH | ID NO |
| 1 | — | n/a | YYYDSSGYY | 4162 | — | n/a | DAFDI | 4538 |
| 2 | G | n/a | YGDY | 4350 | G | n/a | YYFDY | 4568 |
| 3 | D | n/a | DYGDY | 4348 | D | n/a | Y | n/a |
| 4 | A | n/a | YYYDSSGY | 4164 | A | n/a | FDY | n/a |
| 5 | V | n/a | YCSSTSCY | 3810 | V | n/a | DY | n/a |
| 6 | S | n/a | YYDSSGY | 4168 | S | n/a | YGMDV | 4640 |
| 7 | DR | n/a | YCSGGSCY | 3771 | DR | n/a | — | n/a |
| 8 | L | n/a | YCSSTSC | 3812 | L | n/a | LDY | n/a |
| 9 | R | n/a | GG | n/a | R | n/a | GAFDI | 4549 |
| 10 | DL | n/a | RG | n/a | DL | n/a | YFDY | 4567 |
| 11 | T | n/a | SGSY | 3763 | T | n/a | YYGMDV | 4639 |
| 12 | E | n/a | YYDSSGYY | 4165 | E | n/a | AFDI | 4539 |
| 13 | GR | n/a | SS | n/a | GR | n/a | PFDY | 4587 |
| 14 | GG | n/a | YDFWSGY | 4249 | GG | n/a | GMDV | 4641 |
| 15 | DG | n/a | GYCSSTSC | 3809 | DG | n/a | GWFDP | 4619 |
| 16 | DS | n/a | DY | n/a | DS | n/a | YYYYGMDV | 4637 |
| 17 | VG | n/a | YYYDSSG | 4167 | VG | n/a | IDY | n/a |
| 18 | EG | n/a | CSSTSCY | 3813 | EG | n/a | GYFDY | 4577 |
| 19 | P | n/a | YYDFWSGY | 4245 | P | n/a | GFDY | 4590 |
| 20 | GL | n/a | SSGWY | 4461 | GL | n/a | MDV | n/a |
| 21 | GS | n/a | AG | n/a | GS | n/a | VDY | n/a |
| 22 | DP | n/a | DSSGY | 4179 | DP | n/a | YYYGMDV | 4638 |
| 23 | GP | n/a | SSSW | 4443 | GP | n/a | NWFDP | 4595 |
| 24 | GA | n/a | VGAT | 3756 | GA | n/a | PDY | n/a |
| 25 | GV | n/a | SY | n/a | GV | n/a | WFDP | 4596 |
| 26 | H | n/a | DTAM | 4420 | H | n/a | NFDY | 4580 |
| 27 | DRG | n/a | IAAAG | 4449 | DRG | n/a | YWYFDL | 4527 |
| 28 | DQ | n/a | YSSSW | 4439 | DQ | n/a | NAFDI | 4565 |
| 29 | AG | n/a | GS | n/a | AG | n/a | HFDY | 4582 |
| 30 | DLG | n/a | YYDSSG | 4172 | DLG | n/a | SFDY | 4584 |
| 31 | DV | n/a | VG | n/a | DV | n/a | YYYYYGMDV | 4636 |
| 32 | Q | n/a | YSSSWY | 4437 | Q | n/a | DYYYGMDV | 4668 |
| 33 | N | n/a | YCSGGSC | 3773 | N | n/a | DFDY | 4581 |
| 34 | AP | n/a | YDSSGYY | 4169 | AP | n/a | YNWFDP | 4597 |
| 35 | GGG | n/a | GI | n/a | GGG | n/a | DYYYYGMDV | 4655 |
| 36 | DH | n/a | GYCSGGSCY | 3768 | DH | n/a | YYYMDV | 4685 |
| 37 | VP | n/a | YSSS | 4442 | VP | n/a | LFDY | 4586 |
| 38 | SG | n/a | SSGW | 4463 | SG | n/a | DYFDY | 4566 |
| 39 | GRG | n/a | TA | n/a | GRG | n/a | NYYYYGMDV | 4654 |
| 40 | AR | n/a | DSSGYY | 4174 | AR | n/a | GDY | n/a |
| 41 | RG | n/a | GYCSSTSCY | 3807 | RG | n/a | YDY | n/a |
| 42 | ER | n/a | TTVT | 4352 | ER | n/a | SYFDY | 4571 |
| 43 | DA | n/a | YSSGWY | 4458 | DA | n/a | YYMDV | 4686 |
| 44 | AS | n/a | GW | n/a | AS | n/a | TFDY | 4589 |
| 45 | PL | n/a | LG | n/a | PL | n/a | YYYYYYGMDV | 4642 |
| 46 | DQG | n/a | DYGD | 4349 | DQG | n/a | FFDY | 4583 |
| 47 | VL | n/a | TVTT | 4353 | VL | n/a | SYYYYGMDV | 4658 |
| 48 | GT | n/a | AAA | n/a | GT | n/a | VFDY | 4591 |
| 49 | DGG | n/a | YSSGW | 4460 | DGG | n/a | YAFDI | 4540 |
| 50 | DSG | n/a | LV | n/a | DSG | n/a | SDY | n/a |
| 51 | VGG | n/a | YYDFWSGYY | 4243 | VGG | n/a | WYFDL | 4528 |
| 52 | F | n/a | YYDSSGYYY | 4163 | F | n/a | DWFDP | 4609 |
| 53 | AL | n/a | YYDFWSG | 4248 | AL | n/a | AFDY | 4592 |
| 54 | PS | n/a | YGD | n/a | PS | n/a | PYYYYGMDV | 4661 |
| 55 | ES | n/a | YG | n/a | ES | n/a | HYFDY | 4569 |
| 56 | ERG | n/a | GT | n/a | ERG | n/a | DV | n/a |
| 57 | GGV | n/a | YSGSY | 3760 | GGV | n/a | RFDY | 4585 |
| 58 | DRP | n/a | YYYGSGSY | 3972 | DRP | n/a | NYFDY | 4593 |
| 59 | EA | n/a | LR | n/a | EA | n/a | IFDY | 4588 |
| 60 | TP | n/a | SSS | n/a | TP | n/a | ADY | n/a |
| 61 | GPR | n/a | GD | n/a | GPR | n/a | HYYYGMDV | 4669 |
| 62 | LH | n/a | CSGGSCY | 3774 | LH | n/a | GYYYYYGMDV | 4651 |
| 63 | SR | n/a | GY | n/a | SR | n/a | DWYFDL | 4530 |
| 64 | LP | n/a | YCGGDCY | 3866 | LP | n/a | GYYYGMDV | 4677 |
| 65 | LG | n/a | QWLV | 4475 | LG | n/a | YYYYMDV | 4684 |
| 66 | DT | n/a | IAAA | 4452 | DT | n/a | V | n/a |
| 67 | VA | n/a | QG | n/a | VA | n/a | FDP | n/a |
| 68 | SL | n/a | YCSSTSCYT | 3844 | SL | n/a | DDY | n/a |
| 69 | EGG | n/a | SG | n/a | EGG | n/a | GYYYYGMDV | 4664 |
| 70 | DRS | n/a | TTVTT | 4351 | DRS | n/a | YMDV | 4687 |
| 71 | K | n/a | QQL | n/a | K | n/a | NWYFDL | 4532 |
| 72 | DPG | n/a | IAVA | 4472 | DPG | n/a | PYFDY | 4574 |
| 73 | I | n/a | GDY | n/a | I | n/a | FDI | n/a |
| 74 | GD | n/a | YYYDSSGYYY | 4161 | GD | n/a | NDY | n/a |
| 75 | DGT | n/a | DGYN | 4411 | DGT | n/a | HYYYYYGMDV | 4643 |
| 76 | GPP | n/a | CSSTSC | 3814 | GPP | n/a | VYYYGMDV | 4678 |
| 77 | DPP | n/a | IVVVPAAI | 3849 | DPP | n/a | VYFDY | 4578 |
| 78 | RR | n/a | AVAG | 4473 | RR | n/a | SNWFDP | 4600 |
| 79 | EGV | n/a | AA | n/a | EGV | n/a | NYYYGMDV | 4667 |
| 80 | GF | n/a | DSSG | 4185 | GF | n/a | LYYYYGMDV | 4660 |
| 81 | GVG | n/a | VR | n/a | GVG | n/a | DYYYYYGMDV | 4635 |
| 82 | DPS | n/a | YDFWSG | 4253 | DPS | n/a | AAFDI | 4551 |
| 83 | VD | n/a | GYSSSWY | 4435 | VD | n/a | SWFDP | 4613 |
| 84 | GGT | n/a | SGW | n/a | GGT | n/a | SYYYYYGMDV | 4645 |
| 85 | DK | n/a | WG | n/a | DK | n/a | SYYYGMDV | 4671 |
| 86 | GTG | n/a | SGSYY | 3761 | GTG | n/a | P | n/a |
| 87 | DF | n/a | RY | n/a | DF | n/a | YYYYYMDV | 4683 |
| 88 | GQ | n/a | DS | n/a | GQ | n/a | RAFDI | 4544 |
| 89 | SP | n/a | TT | n/a | SP | n/a | RYFDY | 4572 |
| 90 | QG | n/a | YCSGGSCYS | 3769 | QG | n/a | FYYYYGMDV | 4657 |
| 91 | DLT | n/a | PA | n/a | DLT | n/a | GNWFDP | 4606 |
| 92 | AK | n/a | IVVVPAA | 3823 | AK | n/a | RWFDP | 4614 |
| 93 | GPS | n/a | IAAAGT | 4447 | GPS | n/a | GFDP | 4623 |
| 94 | QR | n/a | AAAG | 4453 | QR | n/a | DYYYYMDV | 4714 |
| 95 | VR | n/a | GYCSGGSC | 3770 | VR | n/a | PYYYGMDV | 4674 |
| 96 | DSP | n/a | SGWY | 4464 | DSP | n/a | DP | n/a |
| 97 | DPL | n/a | DYGGN | 4355 | DPL | n/a | HAFDI | 4541 |
| 98 | EGR | n/a | YYYDS | 4176 | EGR | n/a | DNWFDP | 4594 |
| 99 | GRRG | 4789 | YSSG | 4462 | GRRG | 4789 | LNWFDP | 4602 |
| 100 | EV | n/a | YDSSGY | 4173 | EV | n/a | AYYYYGMDV | 4666 |
| 101 | | | VAG | n/a | RP | n/a | | |
| 102 | | | SSW | n/a | GH | n/a | | |
| 103 | | | GSGSY | 3987 | DGR | n/a | | |
| 104 | | | SSSS | 4480 | AA | n/a | | |
| 105 | | | NW | n/a | DD | n/a | | |
| 106 | | | DFWSGY | 4254 | W | n/a | | |
| 107 | | | QQLV | 4455 | GGS | n/a | | |
| 108 | | | YGGN | 4358 | DIS | n/a | | |
| 109 | | | YDSSG | 4178 | GGA | n/a | | |
| 110 | | | GYSYG | 4430 | GK | n/a | | |
| 111 | | | TV | n/a | DGP | n/a | | |
| 112 | | | NG | n/a | DLK | n/a | | |
| 113 | | | IVGAT | 3752 | ET | n/a | | |
| 114 | | | IVGA | 3755 | TT | n/a | | |
| 115 | | | YGSGSY | 3981 | VH | n/a | | |
| 116 | | | SSWY | 4444 | AE | n/a | | |
| 117 | | | ST | n/a | VS | n/a | | |
| 118 | | | DFWSGYY | 4250 | LGG | n/a | | |
| 119 | | | GSY | n/a | C | n/a | | |
| 120 | | | YYDSS | 4177 | DKG | n/a | | |
| 121 | | | VGA | n/a | HA | n/a | | |
| 122 | | | AT | n/a | VI | n/a | | |
| 123 | | | RP | n/a | HP | n/a | | |
| 124 | | | YYYGSGS | 3975 | GGE | n/a | | |
| 125 | | | GIAAAG | 4446 | EP | n/a | | |
| 126 | | | SGY | n/a | EF | n/a | | |
| 127 | | | TG | n/a | DRN | n/a | | |
| 128 | | | LT | n/a | DWG | n/a | | |
| 129 | | | RD | n/a | GE | n/a | | |
| 130 | | | WEL | n/a | DRA | n/a | | |
| 131 | | | YSYG | 4433 | VN | n/a | | |
| 132 | | | TVT | n/a | DRE | n/a | | |
| 133 | | | GYCSGGSCYS | 3767 | DLA | n/a | | |
| 134 | | | AR | n/a | EN | n/a | | |
| 135 | | | YYGSGSY | 3976 | VT | n/a | | |
| 136 | | | RW | n/a | HG | n/a | | |
| 137 | | | DIVVVPA | 3822 | RA | n/a | | |
| 138 | | | YSGS | 3762 | M | n/a | | |
| 139 | | | GYSSSW | 4436 | DVP | n/a | | |
| 140 | | | YSSSS | 4478 | GAP | n/a | | |
| 141 | | | YYYDSS | 4171 | GLG | n/a | | |
| 142 | | | QL | n/a | GPG | n/a | | |
| 143 | | | GYSGYD | 4386 | PG | n/a | | |
| 144 | | | GE | n/a | DSS | n/a | | |
| 145 | | | MA | n/a | SS | n/a | | |
| 146 | | | DSS | n/a | AGG | n/a | | |
| 147 | | | RF | n/a | GGR | n/a | | |
| 148 | | | DTAMV | 4417 | GPN | n/a | | |
| 149 | | | YYGSGSYY | 3973 | DRL | n/a | | |
| 150 | | | VDTAMV | 4414 | GRR | n/a | | |
| 151 | | | FGVV | 4293 | DSGG | 3723 | | |
| 152 | | | EYSSS | 4477 | TR | n/a | | |
| 153 | | | TTV | n/a | DLS | n/a | | |
| 154 | | | SWY | n/a | RGG | n/a | | |
| 155 | | | IAARP | 4483 | Y | n/a | | |
| 156 | | | VE | n/a | EVR | n/a | | |
| 157 | | | SIAA | 4484 | LI | n/a | | |
| 158 | | | YSGYD | 4389 | TF | n/a | | |
| 159 | | | DIVVVPAA | 3819 | LK | n/a | | |
| 160 | | | CSGGSC | 3775 | DLE | n/a | | |
| 161 | | | DW | n/a | GY | n/a | | |
| 162 | | | TS | n/a | DGS | n/a | | |
| 163 | | | RL | n/a | GVR | n/a | | |
| 164 | | | YSS | n/a | GQR | n/a | | |
| 165 | | | GN | n/a | EGL | n/a | | |
| 166 | | | SN | n/a | VLG | n/a | | |
| 167 | | | GYSY | 4432 | QP | n/a | | |
| 168 | | | YYDS | 4183 | VM | n/a | | |
| 169 | | | VDTAM | 4416 | VE | n/a | | |
| 170 | | | LE | n/a | DQGG | 4790 | | |
| 171 | | | AVAGT | 4470 | PN | n/a | | |
| 172 | | | YSY | n/a | DGL | n/a | | |
| 173 | | | SW | n/a | PV | n/a | | |
| 174 | | | SSG | n/a | HR | n/a | | |
| 175 | | | FGV | n/a | AD | n/a | | |
| 176 | | | VP | n/a | DLF | n/a | | |
| 177 | | | VA | n/a | LD | n/a | | |
| 178 | | | SYY | n/a | GGD | n/a | | |
| 179 | | | QWL | n/a | DRR | n/a | | |
| 180 | | | GSG | n/a | DHH | n/a | | |
| 181 | | | TIFGVV | 4280 | DW | n/a | | |
| 182 | | | AVA | n/a | DAS | n/a | | |
| 183 | | | FWSGY | 4260 | GW | n/a | | |
| 184 | | | YSGSYY | 3759 | SV | n/a | | |
| 185 | | | IAVAG | 4469 | GLR | n/a | | |
| 186 | | | YS | n/a | DGA | n/a | | |
| 187 | | | YQL | n/a | LA | n/a | | |
| 188 | | | SIAAR | 4482 | EEG | n/a | | |
| 189 | | | YCGGDC | 3868 | AV | n/a | | |
| 190 | | | NWNY | 3766 | VQ | n/a | | |
| 191 | | | SSSWY | 4440 | AH | n/a | | |
| 192 | | | GIAVA | 4468 | RS | n/a | | |
| 193 | | | YSYGY | 4431 | WA | n/a | | |
| 194 | | | GIAAA | 4448 | LR | n/a | | |
| 195 | | | YYG | n/a | GSG | n/a | | |
| 196 | | | AAG | n/a | GGSG | 3706 | | |
| 197 | | | AV | n/a | DLR | n/a | | |
| 198 | | | AYCGGDCY | 3863 | VWG | n/a | | |
| 199 | | | YYGSGS | 3980 | HL | n/a | | |
| 200 | | | EY | n/a | EH | n/a | | |

TABLE 25
Segments used in Exemplary Library Design 3 (ELD-3). The sequences collectively form a
theoretical segment pool that comprises individual theoretical segment pools of TN1, DH, N2, and H3-JH segments.

| | TN1 | | | | | | | | | | | | | |
|---|---|---|---|---|---|---|---|---|---|---|---|---|---|---|
| Seg- | (plus | SEQ | TN1 Nucleotides | SEQ | | SEQ | | SEQ | | | | SEQ | | SEQ |
| ment | AR or | ID | (plus AR or | ID | | ID | | ID | | N2 | | ID | | ID |
| No. | AK)¹ | NO | AK)¹ | NO | DH | NO | DH Nucleotides | NO | N2 | Nucleotides | H3-JH | NO | H3-JH Nucleotides | NO |
| 1 | AR | n/a | GCCAGA | n/a | GT | n/a | GGTACT | n/a | — | — | — | n/a | — | n/a |
| 2 | ARE | n/a | GCCAGAGAG | n/a | TT | n/a | ACTACT | n/a | A | GCT | Y | n/a | TAT | n/a |
| 3 | ARD | n/a | GCCAGAGAC | n/a | TG | n/a | ACAGGC | n/a | D | GAT | DI | n/a | GATATT | n/a |
| 4 | ARG | n/a | GCCAGAGGA | n/a | ER | n/a | GAGCGT | n/a | E | GAG | DL | n/a | GACTTG | n/a |
| 5 | AREG | 4791 | GCCAGAGAGGGA | 4963 | QLE | n/a | CAATTAGAG | n/a | F | TTC | DP | n/a | GATCCT | n/a |
| 6 | ARDG | 4792 | GCCAGAGACGGA | 4964 | LER | n/a | TTAGAGCGT | n/a | G | GGC | DV | n/a | GATGTA | n/a |
| 7 | ARGG | 4793 | GCCAGAGGTGGA | 4965 | VGAT | 3756 | GTTGGCGCAACT | 5135 | H | CAT | DY | n/a | GACTAT | n/a |
| 8 | ARR | n/a | GCCAGGAGA | n/a | YSG | n/a | TATAGTGGT | n/a | I | ATC | QH | n/a | CAGCAC | n/a |
| 9 | ARER | 4794 | GCCAGAGAGAGA | 4966 | YSGSY | 3760 | TACTCTGGCTCTTAT | 5136 | K | AAA | ADY | n/a | GCTGATTAT | n/a |
| 10 | ARDR | 4795 | GCCAGAGACAGA | 4967 | VG | n/a | GTAGGC | n/a | L | CTG | DDY | n/a | GATGACTAT | n/a |
| 11 | ARGR | 4796 | GCCAGAGGCAGA | 4968 | AT | n/a | GCCACT | n/a | M | ATG | FDI | n/a | TTTGACATT | n/a |
| 12 | ARS | n/a | GCCAGATCT | n/a | WEL | n/a | TGGGAGCTT | n/a | P | CCT | FDL | n/a | TTCGACTTA | n/a |
| 13 | ARES | 4797 | GCCAGAGAATCT | 4969 | YS | n/a | TACAGC | n/a | Q | CAG | FDP | n/a | TTTGACCCT | n/a |
| 14 | ARDS | 4798 | GCCAGAGACTCT | 4970 | SG | n/a | AGTGGT | n/a | R | AGG | FDY | n/a | TTCGACTAT | n/a |
| 15 | ARGS | 4799 | GCCAGAGGTTCT | 4971 | GS | n/a | GGTTCT | n/a | S | TCA | FQH | n/a | TTCCAGCAC | n/a |
| 16 | ARP | n/a | GCCAGACCT | n/a | SY | n/a | AGCTAC | n/a | T | ACC | GDY | n/a | GGTGACTAC | n/a |
| 17 | ARDP | 4800 | GCCAGAGACCCT | 4972 | CSSTSC | 3814 | TGTAGTAGTACAAGTTGC | 5137 | V | GTT | IDY | n/a | ATCGACTAT | n/a |
| 18 | ARGP | 4801 | GCCAGAGGGCCT | 4973 | CSSTSCY | 3813 | TGCTCATCTACATCATGCTAT | 5138 | W | TGG | LDY | n/a | TTGGACTAT | n/a |
| 19 | ARL | n/a | GCCAGATTG | n/a | YCSSTSC | 3812 | TATTGTTCAAGTACATCTTGT | 5139 | Y | TAC | MDV | n/a | ATGGATGTG | n/a |
| 20 | ARDL | 4802 | GCCAGAGACTTG | 4974 | GYCSSTSC | 3809 | GGGTATTGCTCCAGTACCTCATGT | 5140 | AD | GCTGAT | PDY | n/a | CCAGATTAT | n/a |
| 21 | ARGL | 4803 | GCCAGAGGGTTG | 4975 | YCSSTSCY | 3810 | TACTGCAGCAGCACAAGTTGTTAC | 5141 | AG | GCAGGC | SDY | n/a | TCTGATTAC | n/a |
| 22 | ARA | n/a | GCCAGAGCT | n/a | GYCSSTSCY | 3807 | GGGTATTGCAGTTCAACTAGTTGTTAT | 5142 | AP | GCCCCA | VDY | n/a | GTTGACTAC | n/a |
| 23 | AREA | 4804 | GCCAGAGAGGCT | 4976 | YCSSTSCYT | 3844 | TACTGTTCATCAACCTCCTGTTATACT | 5143 | AQ | GCTCAG | YDY | n/a | TATGATTAC | n/a |
| 24 | ARDA | 4805 | GCCAGAGATGCT | 4977 | PAA | n/a | CCTGCCGCT | n/a | AR | GCTAGG | AFDI | 4539 | GCCTTCGATATC | 5251 |
| 25 | ARGA | 4806 | GCCAGAGGTGCT | 4978 | CSGGSCY | 3774 | TGCTCTGGGGGTAGCTGCTAT | 5144 | AS | GCTAGT | AFDY | 4592 | GCCTTCGATTAC | 5252 |
| 26 | ART | n/a | GCCAGAACT | n/a | YCSGGSC | 3773 | TACTGTAGCGGTGGTAGTTGC | 5145 | AT | GCTACC | DFDY | 4581 | GATTTCGACTAT | 5253 |
| 27 | ARET | 4807 | GCCAGAGAGACT | 4979 | GYCSGGSC | 3770 | GGATACTGTAGTGGCGGATCCTGC | 5146 | AY | GCCTAC | FFDY | 4583 | TTCTTCGATTAC | 5254 |
| 28 | ARDT | 4808 | GCCAGAGATACT | 4980 | YCSGGSCY | 3771 | TACTGCTCCGGAGGAAGTTGTTAT | 5147 | DA | GACGCC | GFDP | 4623 | GGGTTTGACCCA | 5255 |
| 29 | ARGT | 4809 | GCCAGAGGCACT | 4981 | GYCSGGSCY | 3768 | GGTTATTGCAGTGGGGGTTCATGTTAC | 5148 | DD | GACGAT | GFDY | 4590 | GGGTTCGACTAC | 5256 |
| 30 | ARV | n/a | GCCAGAGTG | n/a | YCSGGSCYS | 3769 | TACTGTTCCGGAGGTAGCTGTTACTCT | 5149 | DE | GACGAG | GMDV | 4641 | GGCATGGATGTA | 5257 |
| 31 | AREV | 4810 | GCCAGAGAGGTG | 4982 | RI | n/a | AGAATC | n/a | DG | GATGGT | HFDY | 4582 | CACTTTGACTAT | 5258 |
| 32 | ARDV | 4811 | GCCAGAGATGTG | 4983 | GY | n/a | GGATAT | n/a | DL | GACTTG | IFDY | 4588 | ATATTCGATTAC | 5259 |
| 33 | ARGV | 4812 | GCCAGAGGGGTG | 4984 | GG | n/a | GGCGGT | n/a | DP | GACCCT | LFDY | 4586 | TTATTTGATTAT | 5260 |
| 34 | AREGG | 4813 | GCCAGAGAGGGAGGA | 4985 | ATP | n/a | GCTACCCCT | n/a | DS | GACTCC | NFDY | 4580 | AACTTTGATTAC | 5261 |
| 35 | ARDGG | 4814 | GCCAGAGATGGTGGA | 4986 | DI | n/a | GACATC | n/a | DY | GATTAT | PFDY | 4587 | CCCTTCGACTAT | 5262 |
| 36 | ARGGG | 4815 | GCCAGAGGTGGAGGA | 4987 | TP | n/a | ACTCCT | n/a | EA | GAGGCC | RFDY | 4585 | AGGTTTGACTAT | 5263 |
| 37 | ARDGR | 4816 | GCCAGAGACGGCAGA | 4988 | GD | n/a | GGAGAT | n/a | ED | GAGGAC | SFDY | 4584 | AGTTTCGATTAC | 5264 |
| 38 | ARGGS | 4817 | GCCAGAGGCGGTTCT | 4989 | AYCGGDCY | 3863 | GCCTATTGCGGTGGTGACTGCTAT | 5150 | EG | GAAGGA | TFDY | 4589 | ACATTTGACTAC | 5265 |
| 39 | ARGGP | 4818 | GCCAGAGGTGGGCCT | 4990 | AYCGGDC | 3865 | GCATATTGCGGAGGGGATTGC | 5151 | EK | GAGAAA | VFDY | 4591 | GTTTTCGATTAT | 5266 |
| 40 | ARGGA | 4819 | GCCAGAGGAGGTGCT | 4991 | YCGGDCY | 3866 | TATTGTGGTGGGGACTGCTAT | 5152 | ER | GAAAGA | WFDP | 4596 | TGGTTCGATCCA | 5267 |
| 41 | ARDGT | 4820 | GCCAGAGACGGTACT | 4992 | YCGGDC | 3868 | TACTGCGGAGGCGATTGC | 5153 | ES | GAATCT | YFDL | 4529 | TATTTCGACTTA | 5268 |
| 42 | ARGGT | 4821 | GCCAGAGGTGGAACT | 4993 | HI | n/a | CACATC | n/a | ET | GAAACA | YFDY | 4567 | TACTTCGATTAC | 5269 |
| 43 | AREGV | 4822 | GCCAGAGAGGGAGTG | 4994 | TA | n/a | ACAGCT | n/a | FA | TTCGCT | YFQH | 4489 | TATTTCCAGCAC | 5270 |
| 44 | ARGGV | 4823 | GCCAGAGGTGGCGTG | 4995 | GYCSSTSCYA | 3806 | GGGTACTGCTCTAGCACTTCATGCTAC | 5154 | FH | TTCCAT | YMDV | 4687 | TATATGGATGTC | 5271 |
| | | | | | | | GCC | | | | | | | |
| 45 | ARRG | 4824 | GCCAGAAGAGGA | 4996 | SS | n/a | AGTTCT | n/a | FL | TTCTTG | DAFDI | 4538 | GATGCCTTCGACATA | 5272 |
| 46 | ARERG | 4825 | GCCAGAGAGCGTGGA | 4997 | ST | n/a | AGTACT | n/a | FR | TTTAGG | DWFDP | 4609 | GACTGGTTTGACCCC | 5273 |
| 47 | ARDRG | 4826 | GCCAGAGATCGTGGA | 4998 | TS | n/a | ACCAGC | n/a | FS | TTTAGT | DYFDY | 4566 | GACTACTTTGATTAC | 5274 |
| 48 | ARGRG | 4827 | GCCAGAGGCAGGGGA | 4999 | PAAMP | 3835 | CCAGCAGCTATGCCT | 5155 | GA | GGAGCC | EYFQH | 4488 | GAATACTTCCAACAC | 5275 |
| 49 | ARSG | 4828 | GCCAGATCAGGA | 5000 | PA | n/a | CCCGCC | n/a | GD | GGTGAT | GAFDI | 4549 | GGCGCATTCGATATT | 5276 |
| 50 | ARDSG | 4829 | GCCAGAGACTCAGGA | 5001 | MP | n/a | ATGCCT | n/a | GE | GGTGAG | GWFDP | 4619 | GGGTGGTTTGATCCA | 5277 |
| 51 | ARDPG | 4830 | GCCAGAGATCCAGGA | 5002 | VYAIP | 3940 | GTCTATGCAATTCCT | 5156 | GG | GGAGGC | GYFDY | 4577 | GGCTATTTTGACTAC | 5278 |
| 52 | ARLG | 4831 | GCCAGATTGGGA | 5003 | WFGE | 3966 | TGGTTTGGGGAG | 5157 | GL | GGATTG | HAFDI | 4541 | CATGCTTTTGATATA | 5279 |
| 53 | ARDLG | 4832 | GCCAGAGACTTGGGA | 5004 | FGE | n/a | TTTGGAGAG | n/a | GP | GGACCA | HYFDY | 4569 | CATTACTTCGATTAC | 5280 |
| 54 | ARAG | 4833 | GCCAGAGCTGGA | 5005 | GEL | n/a | GGCGAGCTT | n/a | GR | GGTAGG | NAFDI | 4565 | AACGCATTCGATATT | 5281 |
| 55 | ARVG | 4834 | GCCAGAGTGGGA | 5006 | WFG | n/a | TGGTTCGGT | n/a | GS | GGCAGT | NWFDP | 4595 | AACTGGTTCGATCCA | 5282 |
| 56 | ARGVG | 4835 | GCCAGAGGCGTAGGA | 5007 | GSG | n/a | GGTTCAGGC | n/a | GT | GGAACA | NYFDY | 4593 | AATTATTTCGACTAT | 5283 |
| 57 | ARPR | 4836 | GCCAGACCCAGA | 5008 | SGSY | 3763 | AGTGGATCTTAT | 5158 | GV | GGAGTT | PYFDY | 4574 | CCCTACTTTGACTAT | 5284 |
| 58 | ARGPR | 4837 | GCCAGAGGACCAAGA | 5009 | YYGS | 3990 | TATTATGGCAGT | 5159 | GW | GGATGG | RAFDI | 4544 | AGAGCCTTTGATATC | 5285 |
| 59 | ARPS | 4838 | GCCAGACCATCT | 5010 | YYYG | 3989 | TACTACTATGGC | 5160 | GY | GGATAT | RYFDY | 4572 | AGGTACTTCGATTAC | 5286 |
| 60 | ARDPS | 4839 | GCCAGAGATCCCTCT | 5011 | GSGSY | 3987 | GGCAGCGGTTCCTAC | 5161 | HE | CATGAG | SWFDP | 4613 | TCATGGTTCGACCCC | 5287 |
| 61 | ARGPS | 4840 | GCAAGAGGACCTTCT | 5012 | SGSYY | 3761 | AGTGGATCCTATTAC | 5162 | HL | CATTTG | SYFDY | 4571 | AGTTACTTTGACTAT | 5288 |
| 62 | ARDPP | 4841 | GCCAGAGACCCACCT | 5013 | YYYGSG | 3979 | TATTACTACGGGTCTGGC | 5163 | HP | CATCCT | TYFDY | 4576 | ACTTATTTCGACTAC | 5289 |
| 63 | ARGPP | 4842 | GCCAGAGGACCGCCT | 5014 | SGS | n/a | AGCGGCAGT | n/a | HS | CACTCC | VAFDI | 4550 | GTGGCCTTCGACATT | 5290 |
| 64 | ARPL | 4843 | GCCAGACCGTTG | 5015 | YYYGSGS | 3975 | TATTACTACGGATCTGGCTCT | 5164 | IF | ATCTTC | VYFDY | 4578 | GTCTATTTTGATTAT | 5291 |
| 65 | ARDPL | 4844 | GCCAGAGATCCTTTG | 5016 | YYYGSGSY | 3972 | TATTACTATGGCTCTGGTAGCTAC | 5165 | IG | ATCGGC | WYFDL | 4528 | TGGTATTTCGATTTG | 5292 |
| 66 | ARRP | 4845 | GCCAGAAGGCCT | 5017 | YGS | n/a | TATGGCTCC | n/a | IR | ATAAGG | YAFDI | 4540 | TACGCATTTGACATC | 5293 |
| 67 | ARDRP | 4846 | GCCAGAGACCGTCCT | 5018 | YYG | n/a | TACTATGGT | n/a | IS | ATCAGT | YGMDV | 4640 | TACGGCATGGACGTG | 5294 |
| 68 | ARSP | 4847 | GCCAGATCACCT | 5019 | YYY | n/a | TATTATTAT | n/a | KG | AAAGGA | YYFDY | 4568 | TATTATTTTGATTAC | 5295 |
| 69 | ARLP | 4848 | GCCAGACTTCCT | 5020 | MVRG | 4017 | ATGGTAAGAGGT | 5166 | KR | AAGAGA | YYMDV | 4686 | TATTATATGGACGTC | 5296 |
| 70 | ARAP | 4849 | GCCAGAGCCCCT | 5021 | TMVRG | 4010 | ACCATGGTGAGGGGT | 5167 | KV | AAAGTG | AEYFQH | 4526 | GCAGAGTACTTCCAGCAC | 5297 |
| 71 | ARTP | 4850 | GCCAGAACTCCT | 5022 | RGV | n/a | AGAGGAGTT | n/a | LD | TTGGAT | DNWFDP | 4594 | GACAATTGGTTTGATCCC | 5298 |
| 72 | ARVP | 4851 | GCCAGAGTCCCT | 5023 | VRG | n/a | GTCAGAGGC | n/a | LE | TTAGAG | DWYFDL | 4530 | GATTGGTACTTCGACTTG | 5299 |
| 73 | ARVGG | 4852 | GCCAGAGTTGGAGGA | 5024 | FG | n/a | TTCGGC | n/a | LG | TTAGGT | GNWFDP | 4606 | GGGAATTGGTTTGATCCT | 5300 |
| 74 | ARQ | n/a | GCAAGACAG | n/a | GE | n/a | GGCGAG | n/a | LH | TTACAT | NWYFDL | 4532 | AACTGGTATTTCGACTTA | 5301 |
| 75 | ARH | n/a | GCCAGACAC | n/a | YG | n/a | TACGGC | n/a | LL | TTATTG | PNWFDP | 4603 | CCCAATTGGTTTGATCCA | 5302 |
| 76 | ARDQ | 4853 | GCCAGGGACCAG | 5025 | VR | n/a | GTGCGT | n/a | LP | TTACCA | SNWFDP | 4600 | AGTAATTGGTTTGACCCC | 5303 |
| 77 | ARDH | 4854 | GCAAGAGACCAC | 5026 | RG | n/a | AGAGGT | n/a | LR | TTGAGG | YNWFDP | 4597 | TATAATTGGTTTGATCCT | 5304 |
| 78 | ARAR | 4855 | GCAAGGGCTAGA | 5027 | FRE | n/a | TTCAGGGAG | n/a | LS | TTAAGC | YWYFDL | 4527 | TATTGGTATTTTGATTTG | 5305 |
| 79 | ARAS | 4856 | GCTAGGGCATCT | 5028 | RE | n/a | AGAGAG | n/a | LT | TTGACA | YYGMDV | 4639 | TACTATGGGATGGACGTG | 5306 |
| 80 | ARDQG | 4857 | GCTAGGGATCAGGGA | 5029 | QG | n/a | CAAGGT | n/a | LV | TTGGTA | YYYMDV | 4685 | TACTATTACATGGACGTT | 5307 |
| 81 | ARSR | 4858 | GCTAGATCAAGA | 5030 | LR | n/a | TTACGT | n/a | LW | TTGTGG | YYYGMDV | 4638 | TATTATTACGGTATGGACGTC | 5308 |
| 82 | ARDRS | 4859 | GCCAGGGACAGGTCT | 5031 | YYDYVWGSYAYT | 4070 | TACTATGATTACGTCTGGGGGTCTTA | 5168 | LY | TTGTAC | YYYYMDV | 4684 | TACTATTATTACATGGATGTC | 5309 |
| | | | | | | | TGCTTACACT | | | | | | | |
| 83 | ARSL | 4860 | GCTAGATCTTTG | 5032 | YYDYVWGSYAY | 4071 | TACTACGACTATGTATGGGGCTCA | 5169 | MG | ATGGGC | DYYYGMDV | 4668 | GACTATTATTACGGTATGGATGTT | 5310 |
| | | | | | | | TATGCTTAC | | | | | | | |
| 84 | ARLH | 4861 | GCTAGGTTGCAC | 5033 | YYDYVWGSYA | 4073 | TACTACGATTACGTATGGGGAAGCTA | 5170 | MT | ATGACC | GYYYGMDV | 4677 | GGCTACTATTATGGTATGGACGTC | 5311 |
| | | | | | | | CGCT | | | | | | | |
| 85 | ARDLT | 4862 | GCCAGGGATTTGACT | 5034 | YDYVWGSYAY | 4074 | TATGATTATGTGTGGGGGTCATACGC | 5171 | PA | CCTGCT | HYYYGMDV | 4669 | CATTACTACTATGGGATGGATGTA | 5312 |
| | | | | | | | ATAC | | | | | | | |
| 86 | ARK | n/a | GCCAGAAAG | n/a | DY | n/a | GATTAC | n/a | PD | CCTGAT | NYYYYMDV | 4713 | AACTATTATTATTATATGGATGTC | 5313 |
| 87 | ARAE | 4863 | GCAAGAGCCGAG | 5035 | WG | n/a | TGGGGC | n/a | PE | CCTGAG | PYYYYMDV | 4720 | CCCTACTACTACTATATGGATGTG | 5314 |
| 88 | ARDLS | 4864 | GCAAGGGATTTGTCT | 5036 | DYVWGSYAYT | 4075 | GATTATGTGTGGGGGTCTTACGCCTA | 5172 | PF | CCTTTC | RYYYYMDV | 4718 | AGGTATTACTACTACATGGACGTC | 5315 |
| | | | | | | | CACC | | | | | | | |
| 89 | ARGD | 4865 | GCTAGAGGGGAC | 5037 | YDYVWGSYA | 4077 | TACGACTATGTGTGGGGTTCCTATGCT | 5173 | PG | CCTGGT | YYYYGMDV | 4637 | TACTATTATTATGGGATGGATGTA | 5316 |
| 90 | ARRR | 4866 | GCTAGGAGGAGA | 5038 | YYDS | 4183 | TACTACGATTCC | 5174 | PH | CCACAT | DYYYYGMDV | 4655 | GATTACTATTATTACGGAATGGAT | 5317 |
| | | | | | | | | | | | | | GTT | |
| 91 | ARDK | 4867 | GCTAGAGATAAG | 5039 | YYYD | 4182 | TATTATTATGAC | 5175 | PL | CCATTA | GYYYYGMDV | 4664 | GGGTATTACTACTACGGCATGGAC | 5318 |
| | | | | | | | | | | | | | GTA | |
| 92 | ARVS | 4868 | GCTAGAGTATCT | 5040 | DSSGY | 4179 | GACAGTTCCGGGTAC | 5176 | PP | CCTCCA | NYYYYGMDV | 4654 | AATTACTATTACTATGGCATGGAT | 5319 |
| | | | | | | | | | | | | | GTG | |
| 93 | ARDRL | 4869 | GCCAGAGACAGGTTG | 5041 | YDSSG | 4178 | TATGATAGCTCAGGT | 5177 | PQ | CCTCAG | PYYYYGMDV | 4661 | CCATATTACTATTACGGCATGGAT | 5320 |
| | | | | | | | | | | | | | GTC | |
| 94 | ARGQ | 4870 | GCTAGGGGCCAG | 5042 | YYDSS | 4177 | TACTATGACTCATCC | 5178 | PR | CCAAGG | SYYYYGMDV | 4658 | AGCTACTACTACTACGGAATGGAC | 5321 |
| | | | | | | | | | | | | | GTC | |
| 95 | ARVR | 4871 | GCCAGGGTCAGA | 5043 | YYYDS | 4176 | TATTATTACGATAGT | 5179 | PS | CCTTCT | YYYYYGMDV | 4636 | TACTACTACTATTACGGTATGGAC | 5322 |
| | | | | | | | | | | | | | GTA | |
| 96 | ARAK | 4872 | GCTAGGGCTAAG | 5044 | GYY | n/a | GGATATTAC | n/a | PT | CCTACA | DYYYYYYMDV | 4681 | GATTATTATTACTACTACTACATG | 5323 |
| | | | | | | | | | | | | | GATGTA | |
| 97 | ARGK | 4873 | GCCAGGGGTAAG | 5045 | DSSGYY | 4174 | GATTCTTCCGGGTACTAC | 5180 | PV | CCTGTT | GYYYYYGMDV | 4651 | GGTTATTATTACTACTATGGGATG | 5324 |
| | | | | | | | | | | | | | GATGTA | |
| 98 | ARDIS | 4874 | GCAAGGGATATTTCT | 5046 | YDSSGY | 4173 | TATGATTCCAGCGGATAC | 5181 | QG | CAGGGC | HYYYYYGMDV | 4643 | CACTACTATTATTATTACGGGAT | 5325 |
| | | | | | | | | | | | | | GGATGTA | |
| 99 | ARDFT | 4875 | GCTAGGGATTTCACT | 5047 | YYDSSG | 4172 | TACTACGATAGCTCCGGT | 5182 | QL | CAATTA | RYYYYYYMDV | 4692 | AGATACTACTACTATTATTACAT | 5326 |
| | | | | | | | | | | | | | GGATGTA | |
| 100 | ARQG | 4876 | GCCAGGCAGGGA | 5048 | YYYDSS | 4171 | TATTATTACGACTCTTCC | 5183 | QP | CAGCCA | YYYYYYGMDV | 4642 | TATTACTACTATTACTATGGTAT | 5327 |
| | | | | | | | | | | | | | GGACGTT | |
| 101 | AK | n/a | GCCAAG | n/a | YDSSGYY | 4169 | TACGACTCTTCTGGTTATTAC | 5184 | QS | CAGTCA | | | | |
| 102 | AKE | n/a | GCCAAGGAG | n/a | YYDSSGY | 4168 | TATTATGACAGCAGCGGGTAT | 5185 | QT | CAGACT | | | | |
| 103 | AKD | n/a | GCCAAGGAC | n/a | YYYDSSG | 4167 | TACTACTACGATTCCAGCGGT | 5186 | RA | AGGGCT | | | | |
| 104 | AKG | n/a | GCCAAGGGA | n/a | YDSSGYYY | 4166 | TACGACAGTTCCGGATATTATTAC | 5187 | RD | AGGGAC | | | | |
| 105 | AKEG | 4877 | GCCAAGGAAGGA | 5049 | SGY | n/a | AGCGGATAT | n/a | RE | AGGGAG | | | | |
| 106 | AKDG | 4878 | GCCAAGGACGGA | 5050 | YYDSSGYY | 4165 | TACTATGATAGTAGTGGGTACTAT | 5188 | RF | AGATTC | | | | |
| 107 | AKGG | 4879 | GCCAAGGGCGGA | 5051 | YYYDSSGY | 4164 | TACTACTATGACAGCTCAGGGTAT | 5189 | RG | AGGGGA | | | | |
| 108 | AKR | n/a | GCCAAGAGA | n/a | YYDSSGYYY | 4163 | TATTACGACAGCAGTGGCTACTACTAT | 5190 | RH | AGGCAT | | | | |
| 109 | AKER | 4880 | GCCAAGGAAAGA | 5052 | YYYDSSGYY | 4162 | TACTACTACGATAGCTCTGGATACTAT | 5191 | RL | AGATTA | | | | |
| 110 | AKDR | 4881 | GCCAAGGACAGA | 5053 | YYYDSSGYYY | 4161 | TATTATTACGATTCCAGTGGTTATTA | 5192 | RM | AGGATG | | | | |
| | | | | | | | TTAT | | | | | | | |
| 111 | AKGR | 4882 | GCCAAGGGCAGA | 5054 | YDS | n/a | TACGACTCC | n/a | RP | AGGCCA | | | | |
| 112 | AKS | n/a | GCCAAGTCT | n/a | YYD | n/a | TACTATGAC | n/a | RR | CGTAGA | | | | |
| 113 | AKES | 4883 | GCCAAGGAATCT | 5055 | DSSG | 4185 | GACTCATCCGGT | 5193 | RS | AGAAGT | | | | |
| 114 | AKDS | 4884 | GCCAAGGATTCT | 5056 | GYYY | 4188 | GGTTACTATTAC | 5194 | RV | AGAGTG | | | | |
| 115 | AKGS | 4885 | GCCAAGGGATCT | 5057 | SGYY | 4187 | AGCGGCTACTAT | 5195 | RY | AGATAT | | | | |
| 116 | AKP | n/a | GCCAAGCCT | n/a | DS | n/a | GACTCT | n/a | SA | TCAGCC | | | | |
| 117 | AKDP | 4886 | GCCAAGGATCCT | 5058 | RFLEW | 4231 | AGATTTTTGGAGTGG | 5196 | SD | TCAGAC | | | | |
| 118 | AKGP | 4887 | GCCAAGGGTCCT | 5059 | EWL | n/a | GAATGGCTT | n/a | SE | TCCGAG | | | | |
| 119 | AKL | n/a | GCCAAGTTG | n/a | RF | n/a | AGATTC | n/a | SF | TCATTC | | | | |
| 120 | AKDL | 4888 | GCCAAGGACTTG | 5060 | YYDFWSGYYT | 4242 | TACTATGATTTTTGGAGTGGATATTA | 5197 | SG | AGCGGA | | | | |
| | | | | | | | TACC | | | | | | | |
| 121 | AKGL | 4889 | GCCAAGGGGTTG | 5061 | YDFWSG | 4253 | TATGATTTTTGGTCTGGT | 5198 | SH | AGTCAC | | | | |
| 122 | AKA | n/a | GCCAAGGCT | n/a | DFWSGY | 4254 | GATTTTTGGAGCGGCTAT | 5199 | SI | TCTATC | | | | |
| 123 | AKEA | 4890 | GCCAAGGAAGCT | 5062 | FWSGY | 4260 | TTTTGGAGCGGGTAT | 5200 | SK | AGTAAA | | | | |
| 124 | AKDA | 4891 | GCCAAGGACGCT | 5063 | YYDFWSGYY | 4243 | TACTACGACTTCTGGAGCGGGTATTAC | 5201 | SL | TCCTTG | | | | |
| 125 | AKGA | 4892 | GCCAAGGGCGCT | 5064 | YYDFWSGY | 4245 | TACTACGATTTTTGGTCTGGATAT | 5202 | SP | AGCCCA | | | | |
| 126 | AKT | n/a | GCCAAGACT | n/a | YDFWSGYY | 4246 | TATGACTTTTGGAGTGGTTACTAC | 5203 | SQ | AGCCAA | | | | |
| 127 | AKET | 4893 | GCCAAGGAAACT | 5065 | YYDFWSG | 4248 | TACTACGATTTCTGGTCAGGC | 5204 | SR | TCAAGA | | | | |
| 128 | AKDT | 4894 | GCCAAGGATACT | 5066 | YDFWSGY | 4249 | TATGACTTCTGGAGTGGTTAC | 5205 | SS | TCCTCA | | | | |
| 129 | AKGT | 4895 | GCCAAGGGAACT | 5067 | DFWSGYY | 4250 | GACTTCTGGTCAGGATACTAC | 5206 | ST | AGTACA | | | | |
| 130 | AKV | n/a | GCCAAGGTG | n/a | VLRYF | 4307 | GTGTTGAGGTACTTC | 5207 | SV | TCAGTA | | | | |
| 131 | AKEV | 4896 | GCCAAGGAAGTG | 5068 | LRYFD | 4308 | TTAAGATACTTTGAT | 5208 | SW | TCATGG | | | | |
| 132 | AKDV | 4897 | GCCAAGGACGTG | 5069 | RYFDW | 4309 | AGATACTTTGATTGG | 5209 | SY | TCTTAC | | | | |
| 133 | AKGV | 4898 | GCCAAGGGCGTG | 5070 | VLRY | 4312 | GTGTTGAGGTAT | 5210 | TA | ACCGCC | | | | |
| 134 | AKEGG | 4899 | GCCAAGGAGGGAGGA | 5071 | LRYF | 4313 | TTGAGATATTTC | 5211 | TG | ACTGGC | | | | |
| 135 | AKDGG | 4900 | GCCAAGGACGGTGGA | 5072 | RYFD | 4314 | AGATACTTTGAT | 5212 | TP | ACACCA | | | | |
| 136 | AKGGG | 4901 | GCCAAGGGAGGAGGA | 5073 | VLRYFDWL | 4298 | GTCTTAAGGTACTTCGATTGGCTT | 5213 | TR | ACAAGA | | | | |
| 137 | AKDGR | 4902 | GCCAAGGACGGTAGA | 5074 | LRY | n/a | TTAAGATAC | n/a | TS | ACATCT | | | | |
| 138 | AKGGS | 4903 | GCCAAGGGAGGTTCT | 5075 | RYF | n/a | AGATACTTC | n/a | TT | ACTACT | | | | |
| 139 | AKGGP | 4904 | GCCAAGGGAGGTCCT | 5076 | RY | n/a | AGATAT | n/a | TV | ACAGTT | | | | |
| 140 | AKGGA | 4905 | GCCAAGGGAGGCGCT | 5077 | FD | n/a | TTCGAT | n/a | TW | ACTTGG | | | | |
| 141 | AKDGT | 4906 | GCCAAGGATGGCACT | 5078 | DW | n/a | GATTGG | n/a | TY | ACTTAT | | | | |
| 142 | AKGGT | 4907 | GCCAAGGGAGGCACT | 5079 | VLRYFDW | 4300 | GTCTTAAGATACTTTGATTGG | 5214 | VA | GTAGCC | | | | |
| 143 | AKEGV | 4908 | GCCAAGGAAGGAGTG | 5080 | VLRYFD | 4303 | GTGTTGAGGTACTTTGAC | 5215 | VD | GTCGAC | | | | |
| 144 | AKGGV | 4909 | GCCAAGGGCGGTGTG | 5081 | LRYFDW | 4304 | TTAAGATACTTCGATTGG | 5216 | VG | GTTGGA | | | | |
| 145 | AKRG | 4910 | GCCAAGAGAGGA | 5082 | RYFDWL | 4305 | AGATATTTCGACTGGCTT | 5217 | VL | GTCTTG | | | | |
| 146 | AKERG | 4911 | GCCAAGGAGAGAGGA | 5083 | YDILTGYY | 4322 | TATGACATATTGACTGGCTACTAC | 5218 | VP | GTTCCT | | | | |
| 147 | AKDRG | 4912 | GCCAAGGATAGGGGA | 5084 | YDILTGY | 4325 | TATGATATATTAACTGGGTAC | 5219 | VR | GTGAGA | | | | |
| 148 | AKGRG | 4913 | GCCAAGGGTAGGGGA | 5085 | DILTGYY | 4326 | GATATCTTAACCGGGTATTAT | 5220 | VS | GTTTCA | | | | |
| 149 | AKSG | 4914 | GCCAAGTCTGGA | 5086 | DYG | n/a | GATTATGGT | n/a | VT | GTTACC | | | | |
| 150 | AKDSG | 4915 | GCCAAGGATAGTGGA | 5087 | GDY | n/a | GGGGACTAC | n/a | VV | GTAGTA | | | | |
| 151 | AKDPG | 4916 | GCCAAGGACCCCGGA | 5088 | YGD | n/a | TACGGTGAC | n/a | WG | TGGGGT | | | | |
| 152 | AKLG | 4917 | GCCAAGTTAGGA | 5089 | DYGD | 4349 | GATTACGGCGAT | 5221 | WS | TGGTCA | | | | |
| 153 | AKDLG | 4918 | GCCAAGGATCTTGGA | 5090 | YGDY | 4350 | TACGGCGATTAT | 5222 | YA | TACGCT | | | | |
| 154 | AKAG | 4919 | GCCAAGGCTGGA | 5091 | DYGDY | 4348 | GACTACGGAGATTAT | 5223 | YD | TATGAC | | | | |
| 155 | AKVG | 4920 | GCCAAGGTAGGA | 5092 | TTVTT | 4351 | ACCACAGTAACCACC | 5224 | YE | TATGAG | | | | |
| 156 | AKGVG | 4921 | GCCAAGGGTGTCGGA | 5093 | TTVT | 4352 | ACAACTGTGACT | 5225 | YS | TATTCT | | | | |
| 157 | AKPR | 4922 | GCCAAGCCTAGA | 5094 | TVTT | 4353 | ACAGTAACTACT | 5226 | AAA | GCTGCCGCT | | | | |
| 158 | AKGPR | 4923 | GCCAAGGGCCCCAGA | 5095 | RW | n/a | AGATGG | n/a | AGM | GCAGGCATG | | | | |
| 159 | AKPS | 4924 | GCCAAGCCTTCT | 5096 | VTP | n/a | GTAACTCCT | n/a | DGG | GATGGGGGT | | | | |
| 160 | AKDPS | 4925 | GCCAAGGATCCCTCT | 5097 | VD | n/a | GTTGAC | n/a | DGV | GATGGTGTA | | | | |
| 161 | AKGPS | 4926 | GCCAAAGGGCCATCT | 5098 | GYSGYD | 4386 | GGCTACTCAGGATACGAC | 5227 | FGG | TTCGGGGGC | | | | |
| 162 | AKDPP | 4927 | GCCAAGGATCCACCT | 5099 | YSGYD | 4389 | TATAGCGGATATGAC | 5228 | GAG | GGAGCTGGA | | | | |
| 163 | AKGPP | 4928 | GCCAAGGGCCCTCCT | 5100 | RD | n/a | AGAGAT | n/a | GGA | GGAGGGGCC | | | | |
| 164 | AKPL | 4929 | GCCAAGCCGTTG | 5101 | RDGY | 4410 | AGAGATGGTTAC | 5229 | GGG | GGAGGCGGT | | | | |
| 165 | AKDPL | 4930 | GCCAAGGACCCTTTG | 5102 | RDG | n/a | AGAGATGGT | n/a | GGL | GGAGGCTTA | | | | |
| 166 | AKRP | 4931 | GCCAAGAGGCCT | 5103 | DTAM | 4420 | GATACTGCTATG | 5230 | GGR | GGTGGTAGA | | | | |
| 167 | AKDRP | 4932 | GCCAAGGACCGTCCT | 5104 | YGY | n/a | TACGGCTAC | n/a | GGS | GGCGGGAGC | | | | |
| 168 | AKSP | 4933 | GCCAAGAGTCCT | 5105 | YSY | n/a | TATTCTTAC | n/a | GGV | GGTGGGGTA | | | | |
| 169 | AKLP | 4934 | GCCAAGCTACCT | 5106 | YSYG | 4433 | TATTCATATGGT | 5231 | GLG | GGATTAGGC | | | | |
| 170 | AKAP | 4935 | GCCAAGGCTCCT | 5107 | GYSYG | 4430 | GGATATAGTTATGGC | 5232 | GPG | GGCCCCGGC | | | | |
| 171 | AKTP | 4936 | GCCAAGACGCCT | 5108 | SSS | n/a | AGTTCAAGC | n/a | GPP | GGACCACCT | | | | |
| 172 | AKVP | 4937 | GCCAAGGTACCT | 5109 | YSSSWY | 4437 | TACAGTAGCTCTTGGTAC | 5233 | GRG | GGAAGGGGC | | | | |
| 173 | AKVGG | 4938 | GCCAAGGTGGGTGGA | 5110 | GYSSSWY | 4435 | GGCTACAGTTCAAGCTGGTAT | 5234 | GSG | GGATCTGGC | | | | |
| 174 | AKQ | n/a | GCAAAACAG | n/a | SSW | n/a | AGTTCCTGG | n/a | GTG | GGAACTGGC | | | | |
| 175 | AKH | n/a | GCCAAACAC | n/a | SWY | n/a | AGCTGGTAC | n/a | GVG | GGAGTAGGT | | | | |
| 176 | AKDQ | 4939 | GCCAAGGATCAG | 5111 | SSSW | 4443 | AGTAGCTCTTGG | 5235 | LGG | TTGGGAGGC | | | | |
| 177 | AKDH | 4940 | GCTAAAGACCAC | 5112 | YSSS | 4442 | TACAGCAGCTCC | 5236 | LGH | TTGGGCCAC | | | | |
| 178 | AKAR | 4941 | GCCAAGGCAAGA | 5113 | YSSSW | 4439 | TACTCTTCCTCATGG | 5237 | PGG | CCTGGCGGC | | | | |
| 179 | AKAS | 4942 | GCCAAGGCATCT | 5114 | SW | n/a | AGCTGG | n/a | PKQ | CCAAAGCAG | | | | |
| 180 | AKDQG | 4943 | GCAAAGGATCAGGGA | 5115 | AG | n/a | GCTGGT | n/a | PKR | CCTAAAAGG | | | | |
| 181 | AKSR | 4944 | GCCAAGAGTAGA | 5116 | QQLV | 4455 | CAGCAATTGGTT | 5238 | PTQ | CCAACTCAG | | | | |
| 182 | AKDRS | 4945 | GCAAAAGACAGGTCT | 5117 | QQL | n/a | CAGCAACTT | n/a | RFE | AGGTTTGAG | | | | |
| 183 | AKSL | 4946 | GCAAAGAGCTTG | 5118 | GWY | n/a | GGTTGGTAC | n/a | RGG | AGGGGAGGT | | | | |
| 184 | AKLH | 4947 | GCTAAATTGCAC | 5119 | SSGWY | 4461 | AGCTCTGGATGGTAC | 5239 | RGL | AGGGGATTG | | | | |
| 185 | AKDLT | 4948 | GCCAAGGACTTGACT | 5120 | YSSGW | 4460 | TATAGTAGCGGATGG | 5240 | RGS | AGGGGTAGT | | | | |
| 186 | AKK | n/a | GCTAAAAAG | n/a | YSSGWY | 4458 | TATAGCAGCGGTTGGTAC | 5241 | RPL | AGGCCATTA | | | | |
| 187 | AKAE | 4949 | GCTAAAGCAGAG | 5121 | GYSSGWY | 4456 | GGTTATTCATCAGGTTGGTAT | 5242 | RPY | AGGCCATAT | | | | |
| 188 | AKDLS | 4950 | GCAAAAGACTTGTCT | 5122 | SGW | n/a | AGTGGTTGG | n/a | SAA | TCTGCCGCC | | | | |
| 189 | AKGD | 4951 | GCAAAAGGGGAC | 5123 | YSS | n/a | TACAGTTCC | n/a | SGE | AGCGGGGAG | | | | |
| 190 | AKRR | 4952 | GCAAAAAGGAGA | 5124 | SGWY | 4464 | AGTGGTTGGTAT | 5243 | SGG | TCTGGCGGC | | | | |
| 191 | AKDK | 4953 | GCAAAAGACAAG | 5125 | SSGW | 4463 | AGTTCCGGTTGG | 5244 | SGL | TCAGGGTTA | | | | |
| 192 | AKVS | 4954 | GCCAAAGTATCT | 5126 | YSSG | 4462 | TACTCAAGTGGT | 5245 | SGW | AGCGGTTGG | | | | |
| 193 | AKDRL | 4955 | GCAAAAGACAGGTTG | 5127 | GW | n/a | GGTTGG | n/a | SGY | AGCGGCTAC | | | | |
| 194 | AKGQ | 4956 | GCCAAAGGACAG | 5128 | QWLV | 4475 | CAGTGGTTAGTT | 5246 | SRG | TCAAGAGGT | | | | |
| 195 | AKVR | 4957 | GCAAAAGTCAGA | 5129 | EYSS | 4479 | GAGTACTCATCC | 5247 | SSE | TCATCAGAG | | | | |
| 196 | AKAK | 4958 | GCAAAGGCAAAG | 5130 | SIAARP | 4481 | AGCATAGCAGCAAGGCCT | 5248 | SSW | AGCTCATGG | | | | |
| 197 | AKGK | 4959 | GCAAAGGGCAAG | 5131 | RP | n/a | CGTCCT | n/a | TGG | ACCGGTGGC | | | | |
| 198 | AKDIS | 4960 | GCAAAGGACATTTCT | 5132 | IAARP | 4483 | ATAGCAGCAAGGCCT | 5249 | VGR | GTTGGCAGA | | | | |
| 199 | AKDFT | 4961 | GCTAAAGATTTCACT | 5133 | AARP | 4486 | GCCGCAAGACCT | 5250 | VQG | GTGCAAGGA | | | | |
| 200 | AKQG | 4962 | GCCAAGCAAGGA | 5134 | ARP | n/a | GCTAGACCT | n/a | VTA | GTCACAGCT | | | | |

¹“AR” and “AK” refer to the last two C-terminal amino acids of the heavy chain chassis used in the current example. They are not part of the TN1 segment.

TABLE 26
Theoretical segment pool of 300 TN1 segments
(plus AR/AK; which is not part of TN1)
used in the library of Example 12.

| Peptide | SEQ | | SEQ | |
|---|---|---|---|---|
| (plus AR | ID | Nucleotide | ID | |
| or AK)¹ | NO | (plus AR or AK)¹ | NO | In ELD-3? |
| AR | n/a | GCCAGA | n/a | YES |
| AK | n/a | GCCAAG | n/a | YES |
| ARE | n/a | GCCAGAGAG | n/a | YES |
| AKE | n/a | GCCAAGGAG | n/a | YES |
| ARD | n/a | GCCAGAGAC | n/a | YES |
| AKD | n/a | GCCAAGGAC | n/a | YES |
| ARG | n/a | GCCAGAGGA | n/a | YES |
| AKG | n/a | GCCAAGGGA | n/a | YES |
| AREG | 4791 | GCCAGAGAGGGA | 4963 | YES |
| AKEG | 4877 | GCCAAGGAAGGA | 5049 | YES |
| ARDG | 4792 | GCCAGAGACGGA | 4964 | YES |
| AKDG | 4878 | GCCAAGGACGGA | 5050 | YES |
| ARGG | 4793 | GCCAGAGGTGGA | 4965 | YES |
| AKGG | 4879 | GCCAAGGGCGGA | 5051 | YES |
| ARR | n/a | GCCAGGAGA | n/a | YES |
| AKR | n/a | GCCAAGAGA | n/a | YES |
| ARER | 4794 | GCCAGAGAGAGA | 4966 | YES |
| AKER | 4880 | GCCAAGGAAAGA | 5052 | YES |
| ARDR | 4795 | GCCAGAGACAGA | 4967 | YES |
| AKDR | 4881 | GCCAAGGACAGA | 5053 | YES |
| ARGR | 4796 | GCCAGAGGCAGA | 4968 | YES |
| AKGR | 4882 | GCCAAGGGCAGA | 5054 | YES |
| ARS | n/a | GCCAGATCT | n/a | YES |
| AKS | n/a | GCCAAGTCT | n/a | YES |
| ARES | 4797 | GCCAGAGAATCT | 4969 | YES |
| AKES | 4883 | GCCAAGGAATCT | 5055 | YES |
| ARDS | 4798 | GCCAGAGACTCT | 4970 | YES |
| AKDS | 4884 | GCCAAGGATTCT | 5056 | YES |
| ARGS | 4799 | GCCAGAGGTTCT | 4971 | YES |
| AKGS | 4885 | GCCAAGGGATCT | 5057 | YES |
| ARP | n/a | GCCAGACCT | n/a | YES |
| AKP | n/a | GCCAAGCCT | n/a | YES |
| AREP | 5328 | GCCAGAGAGCCT | 5428 | NO |
| AKEP | 5329 | GCCAAGGAGCCT | 5429 | NO |
| ARDP | 4800 | GCCAGAGACCCT | 4972 | YES |
| AKDP | 4886 | GCCAAGGATCCT | 5058 | YES |
| ARGP | 4801 | GCCAGAGGGCCT | 4973 | YES |
| AKGP | 4887 | GCCAAGGGTCCT | 5059 | YES |
| ARL | n/a | GCCAGATTG | n/a | YES |
| AKL | n/a | GCCAAGTTG | n/a | YES |
| AREL | 5330 | GCCAGAGAGTTG | 5430 | NO |
| AKEL | 5331 | GCCAAGGAATTG | 5431 | NO |
| ARDL | 4802 | GCCAGAGACTTG | 4974 | YES |
| AKDL | 4888 | GCCAAGGACTTG | 5060 | YES |
| ARGL | 4803 | GCCAGAGGGTTG | 4975 | YES |
| AKGL | 4889 | GCCAAGGGGTTG | 5061 | YES |
| ARA | n/a | GCCAGAGCT | n/a | YES |
| AKA | n/a | GCCAAGGCT | n/a | YES |
| AREA | 4804 | GCCAGAGAGGCT | 4976 | YES |
| AKEA | 4890 | GCCAAGGAAGCT | 5062 | YES |
| ARDA | 4805 | GCCAGAGATGCT | 4977 | YES |
| AKDA | 4891 | GCCAAGGACGCT | 5063 | YES |
| ARGA | 4806 | GCCAGAGGTGCT | 4978 | YES |
| AKGA | 4892 | GCCAAGGGCGCT | 5064 | YES |
| ART | n/a | GCCAGAACT | n/a | YES |
| AKT | n/a | GCCAAGACT | n/a | YES |
| ARET | 4807 | GCCAGAGAGACT | 4979 | YES |
| AKET | 4893 | GCCAAGGAAACT | 5065 | YES |
| ARDT | 4808 | GCCAGAGATACT | 4980 | YES |
| AKDT | 4894 | GCCAAGGATACT | 5066 | YES |
| ARGT | 4809 | GCCAGAGGCACT | 4981 | YES |
| AKGT | 4895 | GCCAAGGGAACT | 5067 | YES |
| ARV | n/a | GCCAGAGTG | n/a | YES |
| AKV | n/a | GCCAAGGTG | n/a | YES |
| AREV | 4810 | GCCAGAGAGGTG | 4982 | YES |
| AKEV | 4896 | GCCAAGGAAGTG | 5068 | YES |
| ARDV | 4811 | GCCAGAGATGTG | 4983 | YES |
| AKDV | 4897 | GCCAAGGACGTG | 5069 | YES |
| ARGV | 4812 | GCCAGAGGGGTG | 4984 | YES |
| AKGV | 4898 | GCCAAGGGCGTG | 5070 | YES |
| AREGG | 4813 | GCCAGAGAGGGAGGA | 4985 | YES |
| AKEGG | 4899 | GCCAAGGAGGGAGGA | 5071 | YES |
| ARDGG | 4814 | GCCAGAGATGGTGGA | 4986 | YES |
| AKDGG | 4900 | GCCAAGGACGGTGGA | 5072 | YES |
| ARGGG | 4815 | GCCAGAGGTGGAGGA | 4987 | YES |
| AKGGG | 4901 | GCCAAGGGAGGAGGA | 5073 | YES |
| AREGR | 5332 | GCCAGAGAAGGGAGA | 5432 | NO |
| AKEGR | 5333 | GCCAAGGAAGGCAGA | 5433 | NO |
| ARDGR | 4816 | GCCAGAGACGGCAGA | 4988 | YES |
| AKDGR | 4902 | GCCAAGGACGGTAGA | 5074 | YES |
| ARGGR | 5334 | GCCAGAGGAGGTAGA | 5434 | NO |
| AKGGR | 5335 | GCCAAGGGAGGTAGA | 5435 | NO |
| AREGS | 5336 | GCCAGAGAAGGATCT | 5436 | NO |
| AKEGS | 5337 | GCCAAGGAAGGATCT | 5437 | NO |
| ARDGS | 5338 | GCCAGAGACGGATCT | 5438 | NO |
| AKDGS | 5339 | GCCAAGGATGGTTCT | 5439 | NO |
| ARGGS | 4817 | GCCAGAGGCGGTTCT | 4989 | YES |
| AKGGS | 4903 | GCCAAGGGAGGTTCT | 5075 | YES |
| AREGP | 5340 | GCCAGAGAAGGTCCT | 5440 | NO |
| AKEGP | 5341 | GCCAAGGAGGGGCCT | 5441 | NO |
| ARDGP | 5342 | GCCAGAGACGGTCCT | 5442 | NO |
| AKDGP | 5343 | GCCAAGGACGGTCCT | 5443 | NO |
| ARGGP | 4818 | GCCAGAGGTGGGCCT | 4990 | YES |
| AKGGP | 4904 | GCCAAGGGAGGTCCT | 5076 | YES |
| AREGL | 5344 | GCCAGAGAGGGCTTG | 5444 | NO |
| AKEGL | 5345 | GCCAAGGAAGGGTTG | 5445 | NO |
| ARDGL | 5346 | GCCAGAGATGGGTTG | 5446 | NO |
| AKDGL | 5347 | GCCAAGGACGGTTTG | 5447 | NO |
| ARGGL | 5348 | GCCAGAGGTGGATTG | 5448 | NO |
| AKGGL | 5349 | GCCAAGGGAGGGTTG | 5449 | NO |
| AREGA | 5350 | GCCAGAGAAGGAGCT | 5450 | NO |
| AKEGA | 5351 | GCCAAGGAGGGAGCT | 5451 | NO |
| ARDGA | 5352 | GCCAGAGATGGCGCT | 5452 | NO |
| AKDGA | 5353 | GCCAAGGATGGAGCT | 5453 | NO |
| ARGGA | 4819 | GCCAGAGGAGGTGCT | 4991 | YES |
| AKGGA | 4905 | GCCAAGGGAGGCGCT | 5077 | YES |
| ARDGT | 4820 | GCCAGAGACGGTACT | 4992 | YES |
| AKDGT | 4906 | GCCAAGGATGGCACT | 5078 | YES |
| ARGGT | 4821 | GCCAGAGGTGGAACT | 4993 | YES |
| AKGGT | 4907 | GCCAAGGGAGGCACT | 5079 | YES |
| AREGV | 4822 | GCCAGAGAGGGAGTG | 4994 | YES |
| AKEGV | 4908 | GCCAAGGAAGGAGTG | 5080 | YES |
| ARDGV | 5354 | GCCAGAGATGGTGTG | 5454 | NO |
| AKDGV | 5355 | GCCAAGGATGGTGTG | 5455 | NO |
| ARGGV | 4823 | GCCAGAGGTGGCGTG | 4995 | YES |
| AKGGV | 4909 | GCCAAGGGCGGTGTG | 5081 | YES |
| ARRG | 4824 | GCCAGAAGAGGA | 4996 | YES |
| AKRG | 4910 | GCCAAGAGAGGA | 5082 | YES |
| ARERG | 4825 | GCCAGAGAGCGTGGA | 4997 | YES |
| AKERG | 4911 | GCCAAGGAGAGAGGA | 5083 | YES |
| ARDRG | 4826 | GCCAGAGATCGTGGA | 4998 | YES |
| AKDRG | 4912 | GCCAAGGATAGGGGA | 5084 | YES |
| ARGRG | 4827 | GCCAGAGGCAGGGGA | 4999 | YES |
| AKGRG | 4913 | GCCAAGGGTAGGGGA | 5085 | YES |
| ARSG | 4828 | GCCAGATCAGGA | 5000 | YES |
| AKSG | 4914 | GCCAAGTCTGGA | 5086 | YES |
| ARESG | 5356 | GCCAGAGAGTCTGGA | 5456 | NO |
| AKESG | 5357 | GCCAAGGAAAGTGGA | 5457 | NO |
| ARDSG | 4829 | GCCAGAGACTCAGGA | 5001 | YES |
| AKDSG | 4915 | GCCAAGGATAGTGGA | 5087 | YES |
| ARGSG | 5358 | GCCAGAGGCTCTGGA | 5458 | NO |
| AKGSG | 5359 | GCCAAGGGGTCTGGA | 5459 | NO |
| ARPG | 5360 | GCCAGACCAGGA | 5460 | NO |
| AKPG | 5361 | GCCAAGCCCGGA | 5461 | NO |
| ARDPG | 4830 | GCCAGAGATCCAGGA | 5002 | YES |
| AKDPG | 4916 | GCCAAGGACCCCGGA | 5088 | YES |
| ARGPG | 5362 | GCCAGAGGACCTGGA | 5462 | NO |
| AKGPG | 5363 | GCCAAGGGGCCTGGA | 5463 | NO |
| ARLG | 4831 | GCCAGATTGGGA | 5003 | YES |
| AKLG | 4917 | GCCAAGTTAGGA | 5089 | YES |
| ARDLG | 4832 | GCCAGAGACTTGGGA | 5004 | YES |
| AKDLG | 4918 | GCCAAGGATCTTGGA | 5090 | YES |
| ARGLG | 5364 | GCCAGAGGACTAGGA | 5464 | NO |
| AKGLG | 5365 | GCCAAGGGTTTGGGA | 5465 | NO |
| ARAG | 4833 | GCCAGAGCTGGA | 5005 | YES |
| AKAG | 4919 | GCCAAGGCTGGA | 5091 | YES |
| AREAG | 5366 | GCCAGAGAAGCCGGA | 5466 | NO |
| AKEAG | 5367 | GCCAAGGAGGCTGGA | 5467 | NO |
| ARDAG | 5368 | GCCAGAGACGCAGGA | 5468 | NO |
| AKDAG | 5369 | GCCAAGGATGCCGGA | 5469 | NO |
| ARGAG | 5370 | GCCAGAGGTGCCGGA | 5470 | NO |
| AKGAG | 5371 | GCCAAGGGAGCAGGA | 5471 | NO |
| ARTG | 5372 | GCCAGAACTGGA | 5472 | NO |
| AKTG | 5373 | GCCAAGACCGGA | 5473 | NO |
| ARDTG | 5374 | GCCAGAGACACGGGA | 5474 | NO |
| AKDTG | 5375 | GCCAAGGATACGGGA | 5475 | NO |
| ARVG | 4834 | GCCAGAGTGGGA | 5006 | YES |
| AKVG | 4920 | GCCAAGGTAGGA | 5092 | YES |
| AREVG | 5376 | GCCAGAGAAGTCGGA | 5476 | NO |
| AKEVG | 5377 | GCCAAGGAGGTAGGA | 5477 | NO |
| ARDVG | 5378 | GCCAGAGATGTAGGA | 5478 | NO |
| AKDVG | 5379 | GCCAAGGACGTAGGA | 5479 | NO |
| ARGVG | 4835 | GCCAGAGGCGTAGGA | 5007 | YES |
| AKGVG | 4921 | GCCAAGGGTGTCGGA | 5093 | YES |
| ARPR | 4836 | GCCAGACCCAGA | 5008 | YES |
| AKPR | 4922 | GCCAAGCCTAGA | 5094 | YES |
| ARDPR | 5380 | GCCAGAGATCCAAGA | 5480 | NO |
| AKDPR | 5381 | GCCAAGGATCCTAGA | 5481 | NO |
| ARGPR | 4837 | GCCAGAGGACCAAGA | 5009 | YES |
| AKGPR | 4923 | GCCAAGGGCCCCAGA | 5095 | YES |
| ARPS | 4838 | GCCAGACCATCT | 5010 | YES |
| AKPS | 4924 | GCCAAGCCTTCT | 5096 | YES |
| ARDPS | 4839 | GCCAGAGATCCCTCT | 5011 | YES |
| AKDPS | 4925 | GCCAAGGATCCCTCT | 5097 | YES |
| ARGPS | 4840 | GCAAGAGGACCTTCT | 5012 | YES |
| AKGPS | 4926 | GCCAAAGGGCCATCT | 5098 | YES |
| ARPP | 5382 | GCCAGACCACCT | 5482 | NO |
| AKPP | 5383 | GCCAAGCCACCT | 5483 | NO |
| ARDPP | 4841 | GCCAGAGACCCACCT | 5013 | YES |
| AKDPP | 4927 | GCCAAGGATCCACCT | 5099 | YES |
| ARGPP | 4842 | GCCAGAGGACCGCCT | 5014 | YES |
| AKGPP | 4928 | GCCAAGGGCCCTCCT | 5100 | YES |
| ARPL | 4843 | GCCAGACCGTTG | 5015 | YES |
| AKPL | 4929 | GCCAAGCCGTTG | 5101 | YES |
| ARDPL | 4844 | GCCAGAGATCCTTTG | 5016 | YES |
| AKDPL | 4930 | GCCAAGGACCCTTTG | 5102 | YES |
| ARGPL | 5384 | GCCAGAGGTCCCTTG | 5484 | NO |
| AKGPL | 5385 | GCCAAGGGGCCGTTG | 5485 | NO |
| ARPA | 5386 | GCCAGACCAGCT | 5486 | NO |
| AKPA | 5387 | GCCAAGCCGGCT | 5487 | NO |
| ARDPA | 5388 | GCCAGAGATCCCGCT | 5488 | NO |
| AKDPA | 5389 | GCCAAGGACCCCGCT | 5489 | NO |
| ARPT | 5390 | GCCAGACCTACT | 5490 | NO |
| AKPT | 5391 | GCCAAGCCTACT | 5491 | NO |
| ARDPT | 5392 | GCCAGAGATCCGACT | 5492 | NO |
| AKDPT | 5393 | GCCAAGGACCCTACT | 5493 | NO |
| ARGPT | 5394 | GCCAGAGGACCCACT | 5494 | NO |
| AKGPT | 5395 | GCCAAGGGGCCCACT | 5495 | NO |
| ARPV | 5396 | GCCAGACCGGTG | 5496 | NO |
| AKPV | 5397 | GCCAAGCCAGTG | 5497 | NO |
| ARDPV | 5398 | GCCAGAGATCCGGTG | 5498 | NO |
| AKDPV | 5399 | GCCAAGGACCCTGTG | 5499 | NO |
| ARRP | 4845 | GCCAGAAGGCCT | 5017 | YES |
| AKRP | 4931 | GCCAAGAGGCCT | 5103 | YES |
| ARDRP | 4846 | GCCAGAGACCGTCCT | 5018 | YES |
| AKDRP | 4932 | GCCAAGGACCGTCCT | 5104 | YES |
| ARGRP | 5400 | GCCAGAGGAAGGCCT | 5500 | NO |
| AKGRP | 5401 | GCCAAGGGCCGTCCT | 5501 | NO |
| ARSP | 4847 | GCCAGATCACCT | 5019 | YES |
| AKSP | 4933 | GCCAAGAGTCCT | 5105 | YES |
| ARDSP | 5402 | GCCAGAGACTCTCCT | 5502 | NO |
| AKDSP | 5403 | GCCAAGGACTCCCCT | 5503 | NO |
| ARGSP | 5404 | GCCAGAGGTTCCCCT | 5504 | NO |
| AKGSP | 5405 | GCCAAGGGTTCACCT | 5505 | NO |
| ARLP | 4848 | GCCAGACTTCCT | 5020 | YES |
| AKLP | 4934 | GCCAAGCTACCT | 5106 | YES |
| ARDLP | 5406 | GCCAGAGATCTTCCT | 5506 | NO |
| AKDLP | 5407 | GCCAAGGATCTACCT | 5507 | NO |
| ARAP | 4849 | GCCAGAGCCCCT | 5021 | YES |
| AKAP | 4935 | GCCAAGGCTCCT | 5107 | YES |
| ARDAP | 5408 | GCCAGAGATGCTCCT | 5508 | NO |
| AKDAP | 5409 | GCCAAGGATGCTCCT | 5509 | NO |
| ARGAP | 5410 | GCCAGAGGGGCCCCT | 5510 | NO |
| AKGAP | 5411 | GCCAAGGGTGCCCCT | 5511 | NO |
| ARTP | 4850 | GCCAGAACTCCT | 5022 | YES |
| AKTP | 4936 | GCCAAGACGCCT | 5108 | YES |
| ARDTP | 5412 | GCCAGAGATACCCCT | 5512 | NO |
| AKDTP | 5413 | GCCAAGGACACGCCT | 5513 | NO |
| ARVP | 4851 | GCCAGAGTCCCT | 5023 | YES |
| AKVP | 4937 | GCCAAGGTACCT | 5109 | YES |
| ARAGG | 5414 | GCCAGAGCTGGCGGA | 5514 | NO |
| AKAGG | 5415 | GCCAAGGCCGGTGGA | 5515 | NO |
| ARDGGG | 5416 | GCCAGAGATGGTGGCGGA | 5516 | NO |
| AKDGGG | 5417 | GCCAAGGACGGCGGTGGA | 5517 | NO |
| ARLGG | 5418 | GCCAGATTGGGCGGA | 5518 | NO |
| AKLGG | 5419 | GCCAAGCTAGGCGGA | 5519 | NO |
| ARDLGG | 5420 | GCCAGAGATTTGGGTGGA | 5520 | NO |
| AKDLGG | 5421 | GCCAAGGATTTGGGTGGA | 5521 | NO |
| ARRGG | 5422 | GCCAGAAGAGGTGGA | 5522 | NO |
| AKRGG | 5423 | GCCAAGAGAGGAGGA | 5523 | NO |
| ARDRGG | 5424 | GCCAGAGACCGTGGCGGA | 5524 | NO |
| AKDRGG | 5425 | GCCAAGGACAGAGGTGGA | 5525 | NO |
| ARSGG | 5426 | GCCAGATCAGGCGGA | 5526 | NO |
| AKSGG | 5427 | GCCAAGTCCGGTGGA | 5527 | NO |
| ARVGG | 4852 | GCCAGAGTTGGAGGA | 5024 | YES |
| AKVGG | 4938 | GCCAAGGTGGGTGGA | 5110 | YES |
| ARQ | n/a | GCAAGACAG | n/a | YES |
| AKQ | n/a | GCAAAACAG | n/a | YES |
| ARH | n/a | GCCAGACAC | n/a | YES |
| AKH | n/a | GCCAAACAC | n/a | YES |
| ARDQ | 4853 | GCCAGGGACCAG | 5025 | YES |
| AKDQ | 4939 | GCCAAGGATCAG | 5111 | YES |
| ARDH | 4854 | GCAAGAGACCAC | 5026 | YES |
| AKDH | 4940 | GCTAAAGACCAC | 5112 | YES |
| ARAR | 4855 | GCAAGGGCTAGA | 5027 | YES |
| AKAR | 4941 | GCCAAGGCAAGA | 5113 | YES |
| ARAS | 4856 | GCTAGGGCATCT | 5028 | YES |
| AKAS | 4942 | GCCAAGGCATCT | 5114 | YES |
| ARDQG | 4857 | GCTAGGGATCAGGGA | 5029 | YES |
| AKDQG | 4943 | GCAAAGGATCAGGGA | 5115 | YES |
| ARSR | 4858 | GCTAGATCAAGA | 5030 | YES |
| AKSR | 4944 | GCCAAGAGTAGA | 5116 | YES |
| ARDRS | 4859 | GCCAGGGACAGGTCT | 5031 | YES |
| AKDRS | 4945 | GCAAAAGACAGGTCT | 5117 | YES |
| ARSL | 4860 | GCTAGATCTTTG | 5032 | YES |
| AKSL | 4946 | GCAAAGAGCTTG | 5118 | YES |
| ARLH | 4861 | GCTAGGTTGCAC | 5033 | YES |
| AKLH | 4947 | GCTAAATTGCAC | 5119 | YES |
| ARDLT | 4862 | GCCAGGGATTTGACT | 5034 | YES |
| AKDLT | 4948 | GCCAAGGACTTGACT | 5120 | YES |
| ARK | n/a | GCCAGAAAG | n/a | YES |
| AKK | n/a | GCTAAAAAG | n/a | YES |
| ARAE | 4863 | GCAAGAGCCGAG | 5035 | YES |
| AKAE | 4949 | GCTAAAGCAGAG | 5121 | YES |
| ARDLS | 4864 | GCAAGGGATTTGTCT | 5036 | YES |
| AKDLS | 4950 | GCAAAAGACTTGTCT | 5122 | YES |
| ARGD | 4865 | GCTAGAGGGGAC | 5037 | YES |
| AKGD | 4951 | GCAAAAGGGGAC | 5123 | YES |
| ARRR | 4866 | GCTAGGAGGAGA | 5038 | YES |
| AKRR | 4952 | GCAAAAAGGAGA | 5124 | YES |
| ARDK | 4867 | GCTAGAGATAAG | 5039 | YES |
| AKDK | 4953 | GCAAAAGACAAG | 5125 | YES |
| ARVS | 4868 | GCTAGAGTATCT | 5040 | YES |
| AKVS | 4954 | GCCAAAGTATCT | 5126 | YES |
| ARDRL | 4869 | GCCAGAGACAGGTTG | 5041 | YES |
| AKDRL | 4955 | GCAAAAGACAGGTTG | 5127 | YES |
| ARGQ | 4870 | GCTAGGGGCCAG | 5042 | YES |
| AKGQ | 4956 | GCCAAAGGACAG | 5128 | YES |
| ARVR | 4871 | GCCAGGGTCAGA | 5043 | YES |
| AKVR | 4957 | GCAAAAGTCAGA | 5129 | YES |
| ARAK | 4872 | GCTAGGGCTAAG | 5044 | YES |
| AKAK | 4958 | GCAAAGGCAAAG | 5130 | YES |
| ARGK | 4873 | GCCAGGGGTAAG | 5045 | YES |
| AKGK | 4959 | GCAAAGGGCAAG | 5131 | YES |
| ARDIS | 4874 | GCAAGGGATATTTCT | 5046 | YES |
| AKDIS | 4960 | GCAAAGGACATTTCT | 5132 | YES |
| ARDFT | 4875 | GCTAGGGATTTCACT | 5047 | YES |
| AKDFT | 4961 | GCTAAAGATTTCACT | 5133 | YES |
| ARQG | 4876 | GCCAGGCAGGGA | 5048 | YES |
| AKQG | 4962 | GCCAAGCAAGGA | 5134 | YES |

¹“AR” and “AK” refer to the last two C-terminal amino acids of the heavy chain chassis used in the current example. They are not part of the TN1 segment.

TABLE 27
Theoretical segment pool of degenerate
oligonucleotide sequences encoding DH
segments of Example 13.

| | Degenerate | Peptide | SEQ ID |
|---|---|---|---|
| Name | Oligo | Length | NO |
| DH_001 | KHTGAK | 2 | n/a |
| DH_002 | KHTKGG | 2 | n/a |
| DH_003 | KHTCMT | 2 | n/a |
| DH_004 | KHTMCT | 2 | n/a |
| DH_005 | GVCWSG | 2 | n/a |
| DH_006 | SVCYAT | 2 | n/a |
| DH_007 | BYCSAG | 2 | n/a |
| DH_008 | SBAMAG | 2 | n/a |
| DH_009 | VSCMAA | 2 | n/a |
| DH_010 | GRABYT | 2 | n/a |
| DH_011 | GRAKBG | 2 | n/a |
| DH_012 | RDAGAK | 2 | n/a |
| DH_013 | RDAGRT | 2 | n/a |
| DH_014 | YHTSAC | 2 | n/a |
| DH_015 | YHTKAC | 2 | n/a |
| DH_016 | YHTMCG | 2 | n/a |
| DH_017 | MHAGAW | 2 | n/a |
| DH_018 | MHAGRT | 2 | n/a |
| DH_019 | MHAMCT | 2 | n/a |
| DH_020 | MBCYAT | 2 | n/a |
| DH_021 | CVACNG | 2 | n/a |
| DH_022 | MSCAHG | 2 | n/a |
| DH_023 | CRGKBG | 2 | n/a |
| DH_024 | WSGHCT | 2 | n/a |
| DH_025 | WGGKHT | 2 | n/a |
| DH_026 | BGGSAK | 2 | n/a |
| DH_027 | BWCAMA | 2 | n/a |
| DH_028 | BHCTGG | 2 | n/a |
| DH_029 | TGGVBT | 2 | n/a |
| DH_030 | BHCAGT | 2 | n/a |
| DH_031 | SRTATT | 2 | n/a |
| DH_032 | ACABHT | 2 | n/a |
| DH_033 | SVCGCT | 2 | n/a |
| DH_034 | ATGSVT | 2 | n/a |
| DH_035 | SWGAGG | 2 | n/a |
| DH_036 | GTAGCAVBT | 3 | n/a |
| DH_037 | DBGSWACTT | 3 | n/a |
| DH_038 | VNCBCAGGT | 3 | n/a |
| DH_039 | VNCDCATAT | 3 | n/a |
| DH_040 | VHAKKGTTG | 3 | n/a |
| DH_041 | CCAGCABHT | 3 | n/a |
| DH_042 | VHASRACTT | 3 | n/a |
| DH_043 | BHCAGCRST | 3 | n/a |
| DH_044 | BHCGGAKMT | 3 | n/a |
| DH_045 | BHCGGAGDT | 3 | n/a |
| DH_046 | BHCAGCKMT | 3 | n/a |
| DH_047 | NHCCRACTT | 3 | n/a |
| DH_048 | NHCAGCKGG | 3 | n/a |
| DH_049 | BHCGGAKSG | 3 | n/a |
| DH_050 | VBCGGAGNT | 3 | n/a |
| DH_051 | NHCAGCGVT | 3 | n/a |
| DH_052 | NHCTACGVT | 3 | n/a |
| DH_053 | NHCAGCGVG | 3 | n/a |
| DH_054 | VHATGGSYG | 3 | n/a |
| DH_055 | VNCGHCTAT | 3 | n/a |
| DH_056 | GGTRNACTT | 3 | n/a |
| DH_057 | NHCABAGGT | 3 | n/a |
| DH_058 | VHAGCAGNT | 3 | n/a |
| DH_059 | DBGKYCGGT | 3 | n/a |
| DH_060 | BHCGGARKT | 3 | n/a |
| DH_061 | NHCGTAGVT | 3 | n/a |
| DH_062 | VNTTHCTAT | 3 | n/a |
| DH_063 | GTAGTABHT | 3 | n/a |
| DH_064 | VBCGNCCTT | 3 | n/a |
| DH_065 | BHCGGAGNG | 3 | n/a |
| DH_066 | VNCGHCGGT | 3 | n/a |
| DH_067 | AGGBHCGGT | 3 | n/a |
| DH_068 | VNCTBGTAT | 3 | n/a |
| DH_069 | VNCTBGCTT | 3 | n/a |
| DH_070 | NHCKACTAT | 3 | n/a |
| DH_071 | CTARNACTT | 3 | n/a |
| DH_072 | NHCBCAGGT | 3 | n/a |
| DH_073 | NHCTACBAT | 3 | n/a |
| DH_074 | BHCACAGCCAKS | 4 | 5528 |
| DH_075 | VHGGBAGCAACT | 4 | 5529 |
| DH_076 | DBGTTCGGAGNG | 4 | 5530 |
| DH_077 | BHCGGAKMCTAT | 4 | 5531 |
| DH_078 | TACAGCAGCVBT | 4 | 5532 |
| DH_079 | VHGGTARSAGGT | 4 | 5533 |
| DH_080 | VBCGACGGATHT | 4 | 5534 |
| DH_081 | NHCTACGGAGVT | 4 | 5535 |
| DH_082 | VHGRYGGCAACT | 4 | 5536 |
| DH_083 | VHATACAGCRST | 4 | 5537 |
| DH_084 | CAGTGGCTABHT | 4 | 5538 |
| DH_085 | VHAGTAGCAGNT | 4 | 5539 |
| DH_086 | VBCACAGTARMG | 4 | 5540 |
| DH_087 | AGCAGCAGCDBG | 4 | 5541 |
| DH_088 | NHCTMCTACGGT | 4 | 5542 |
| DH_089 | BHCAGCTGGTHT | 4 | 5543 |
| DH_090 | VHACAACTAGNT | 4 | 5544 |
| DH_091 | BHCGGAAGCKMT | 4 | 5545 |
| DH_092 | BHCGGATSGTAT | 4 | 5546 |
| DH_093 | NHCAGCGGABGG | 4 | 5547 |
| DH_094 | BHCGGATACKMT | 4 | 5548 |
| DH_095 | VHAGTAACARMG | 4 | 5549 |
| DH_096 | GCAGCAGCAVBT | 4 | 5550 |
| DH_097 | VBCAYATTCGGT | 4 | 5551 |
| DH_098 | GTAGCAGCAVHA | 4 | 5552 |
| DH_099 | NHCTACTACGVT | 4 | 5553 |
| DH_100 | VBCKMCGGATAT | 4 | 5554 |
| DH_101 | VHACAACTAKKG | 4 | 5555 |
| DH_102 | VHGGGARKCGCT | 4 | 5556 |
| DH_103 | VBTBTCGGAGAG | 4 | 5557 |
| DH_104 | BHCTACAGCKMT | 4 | 5558 |
| DH_105 | VHAGTASSAGCT | 4 | 5559 |
| DH_106 | VBTCDAGGAGTT | 4 | 5560 |
| DH_107 | GACAGCAGCDBG | 4 | 5561 |
| DH_108 | VBCGVCTACAGT | 4 | 5562 |
| DH_109 | NHCTACGGAKCT | 4 | 5563 |
| DH_110 | NHCTACTACTHT | 4 | 5564 |
| DH_111 | BHCVGCTACAGT | 4 | 5565 |
| DH_112 | VBCTGGTTCGGT | 4 | 5566 |
| DH_113 | VNCTACTACTHT | 4 | 5567 |
| DH_114 | VHABTCGGAGGT | 4 | 5568 |
| DH_115 | NHCATGGTAAGAGVT | 5 | 5569 |
| DH_116 | NHCTACGGAGACTHT | 5 | 5570 |
| DH_117 | VBCTACAGCTACGNT | 5 | 5571 |
| DH_118 | VNCAGCGGAAGCTHT | 5 | 5572 |
| DH_119 | VBCTTTCTAGAATBG | 5 | 5573 |
| DH_120 | BHCGGAAGCTACKMT | 5 | 5574 |
| DH_121 | NHCAGCGGAAGCTHT | 5 | 5575 |
| DH_122 | BHCAGCAGCAGCTBG | 5 | 5576 |
| DH_123 | BHCAGCAGCGGATBG | 5 | 5577 |
| DH_124 | VBCACAGTAACAANA | 5 | 5578 |
| DH_125 | BHCAGCAGCAGCTHT | 5 | 5579 |
| DH_126 | NHCAGCGGATGGTHT | 5 | 5580 |
| DH_127 | NHCAGCGGATACGVT | 5 | 5581 |
| DH_128 | NHCTACTACGACABT | 5 | 5582 |
| DH_129 | BHCAGCAGCGGATHT | 5 | 5583 |
| DH_130 | VHAGCAGCAAGACNT | 5 | 5584 |
| DH_131 | VHGTACTACTACGVT | 5 | 5585 |
| DH_132 | VBCACAATGGTACRG | 5 | 5586 |
| DH_133 | NHCATGGTACRAGGT | 5 | 5587 |
| DH_134 | NHCTSGGGAAGCTAT | 5 | 5588 |
| DH_135 | BHCAGCAGCAGCTGGTHT | 6 | 5589 |
| DH_136 | NHCTACTACGACAGCABT | 6 | 5590 |
| DH_137 | VBCTACAGCGGATACGNT | 6 | 5591 |
| DH_138 | BHCAGCAGCGGATGGTHT | 6 | 5592 |
| DH_139 | NHCTACTACGGAAGCGVT | 6 | 5593 |
| DH_140 | BHCAGCAGCGGATACTHT | 6 | 5594 |
| DH_141 | NHCTACGACAGCAGCGVT | 6 | 5595 |
| DH_142 | NHCGACTTCTGGAGCGVT | 6 | 5596 |
| DH_143 | BHCGACAGCAGCGGATHT | 6 | 5597 |
| DH_144 | SNATACTTCGACTGGYYT | 6 | 5598 |
| DH_145 | TGTRGCRGCACAAGCTGT | 6 | 5599 |
| DH_146 | NHCTACTACGGAAGCGVG | 6 | 5600 |
| DH_147 | TGTRGCRGCGGAAGCTGT | 6 | 5601 |
| DH_148 | NHCTTTTGGAGCGGATHT | 6 | 5602 |
| DH_149 | NHCTACTACGACAGCAGCGVT | 7 | 5603 |
| DH_150 | NHCGACATACTAACAGGATHT | 7 | 5604 |
| DH_151 | NHCTACGACTTCTGGAGCGVT | 7 | 5605 |
| DH_152 | BHCTGTAGCAGCACAAGCTGT | 7 | 5606 |
| DH_153 | DBGTACAGCAGCAGCTGGTHT | 7 | 5607 |
| DH_154 | NHCTACGACAGCAGCGGATHT | 7 | 5608 |
| DH_155 | NHCTACTACGGAAGCGGAABT | 7 | 5609 |
| DH_156 | DBGTACAGCAGCGGATGGTHT | 7 | 5610 |
| DH_157 | BHCTGTAGCGGAGGAAGCTGT | 7 | 5611 |
| DH_158 | TGTAGCGGAGGAAGCTGTYHT | 7 | 5612 |
| DH_159 | TGTAGCAGCACAAGCTGTYHT | 7 | 5613 |
| DH_160 | NHCTGTGGAGGAGACTGTTHT | 7 | 5614 |
| DH_161 | NHCGACTTCTGGAGCGGATHT | 7 | 5615 |
| DH_162 | BHCGACAGCAGCGGATACTHT | 7 | 5616 |
| DH_163 | VHATACTGTGGAGGAGACTGT | 7 | 5617 |
| DH_164 | NHCTACTACGACAGCAGCGGATHT | 8 | 5618 |
| DH_165 | NHCTACTACGGAAGCGGAAGCTHT | 8 | 5619 |
| DH_166 | VBCTACTGTAGCAGCACAAGCTGT | 8 | 5620 |
| DH_167 | VBCTACTGTAGCGGAGGAAGCTGT | 8 | 5621 |
| DH_168 | NHCTACGACTTCTGGAGCGGATHT | 8 | 5622 |
| DH_169 | NHCGACATACTAACAGGATACTHT | 8 | 5623 |
| DH_170 | BHCTGTAGCGGAGGAAGCTGTTHT | 8 | 5624 |
| DH_171 | BHCTGTAGCAGCACAAGCTGTTHT | 8 | 5625 |
| DH_172 | VHATACTGTGGAGGAGACTGTTHT | 8 | 5626 |
| DH_173 | NHCTACGACAGCAGCGGATACTHT | 8 | 5627 |
| DH_174 | VNCTACTACGGAAGCGGAAGCTMT | 8 | 5628 |
| DH_175 | NHCGACTTCTGGAGCGGATACTHT | 8 | 5629 |
| DH_176 | VHACTAAGATACTTCGACTGGYWT | 8 | 5630 |
| DH_177 | NHCTACTACGACAGCAGCGGATACTHT | 9 | 5631 |
| DH_178 | VBCTACTGTAGCGGAGGAAGCTGTTHT | 9 | 5632 |
| DH_179 | VBCTACTGTAGCAGCACAAGCTGTTHT | 9 | 5633 |
| DH_180 | NHCTACGACTTCTGGAGCGGATACTHT | 9 | 5634 |
| DH_181 | BHCTGTAGCGGAGGAAGCTGTTACTHT | 9 | 5635 |
| DH_182 | NHCTACTACGACAGCAGCGGATACT | 10 | 5636 |
| | ACTHT | | |
| DH_183 | NHCTACGACTACGTATGGGGAAGCTAC | 11 | 5637 |
| | GCATHT | | |
| DH_184 | NHCTACGACTACGTATGGGGAAGCTACGC | 12 | 5638 |
| | ATACAHA | | |

TABLE 28
Theoretical segment pool of unique DH polypeptide
segments encoded by the degenerate
oligonucleotides of Table 27.

| Name | Sequence | Length | SEQ ID NO |
|---|---|---|---|
| PDH_0001 | YE | 2 | n/a |
| PDH_0002 | DD | 2 | n/a |
| PDH_0003 | VD | 2 | n/a |
| PDH_0004 | FD | 2 | n/a |
| PDH_0005 | AE | 2 | n/a |
| PDH_0006 | SD | 2 | n/a |
| PDH_0007 | YD | 2 | n/a |
| PDH_0008 | VE | 2 | n/a |
| PDH_0009 | DE | 2 | n/a |
| PDH_0010 | AD | 2 | n/a |
| PDH_0011 | FE | 2 | n/a |
| PDH_0012 | SE | 2 | n/a |
| PDH_0013 | VG | 2 | n/a |
| PDH_0014 | FW | 2 | n/a |
| PDH_0015 | YG | 2 | n/a |
| PDH_0016 | DW | 2 | n/a |
| PDH_0017 | FG | 2 | n/a |
| PDH_0018 | AW | 2 | n/a |
| PDH_0019 | DG | 2 | n/a |
| PDH_0020 | YW | 2 | n/a |
| PDH_0021 | SG | 2 | n/a |
| PDH_0022 | AG | 2 | n/a |
| PDH_0023 | VW | 2 | n/a |
| PDH_0024 | SW | 2 | n/a |
| PDH_0025 | VP | 2 | n/a |
| PDH_0026 | DH | 2 | n/a |
| PDH_0027 | DP | 2 | n/a |
| PDH_0028 | YP | 2 | n/a |
| PDH_0029 | SH | 2 | n/a |
| PDH_0030 | VH | 2 | n/a |
| PDH_0031 | FH | 2 | n/a |
| PDH_0032 | YH | 2 | n/a |
| PDH_0033 | FP | 2 | n/a |
| PDH_0034 | AP | 2 | n/a |
| PDH_0035 | SP | 2 | n/a |
| PDH_0036 | AH | 2 | n/a |
| PDH_0037 | YT | 2 | n/a |
| PDH_0038 | DT | 2 | n/a |
| PDH_0039 | AT | 2 | n/a |
| PDH_0040 | ST | 2 | n/a |
| PDH_0041 | FT | 2 | n/a |
| PDH_0042 | VT | 2 | n/a |
| PDH_0043 | AS | 2 | n/a |
| PDH_0044 | AR | 2 | n/a |
| PDH_0045 | DS | 2 | n/a |
| PDH_0046 | GT | 2 | n/a |
| PDH_0047 | GS | 2 | n/a |
| PDH_0048 | GW | 2 | n/a |
| PDH_0049 | GR | 2 | n/a |
| PDH_0050 | DR | 2 | n/a |
| PDH_0051 | PH | 2 | n/a |
| PDH_0052 | RH | 2 | n/a |
| PDH_0053 | PY | 2 | n/a |
| PDH_0054 | GH | 2 | n/a |
| PDH_0055 | GY | 2 | n/a |
| PDH_0056 | RY | 2 | n/a |
| PDH_0057 | HH | 2 | n/a |
| PDH_0058 | HY | 2 | n/a |
| PDH_0059 | DY | 2 | n/a |
| PDH_0060 | AY | 2 | n/a |
| PDH_0061 | AQ | 2 | n/a |
| PDH_0062 | FQ | 2 | n/a |
| PDH_0063 | LE | 2 | n/a |
| PDH_0064 | PE | 2 | n/a |
| PDH_0065 | LQ | 2 | n/a |
| PDH_0066 | PQ | 2 | n/a |
| PDH_0067 | VQ | 2 | n/a |
| PDH_0068 | SQ | 2 | n/a |
| PDH_0069 | RK | 2 | n/a |
| PDH_0070 | GK | 2 | n/a |
| PDH_0071 | AK | 2 | n/a |
| PDH_0072 | RQ | 2 | n/a |
| PDH_0073 | GQ | 2 | n/a |
| PDH_0074 | LK | 2 | n/a |
| PDH_0075 | VK | 2 | n/a |
| PDH_0076 | PK | 2 | n/a |
| PDH_0077 | SK | 2 | n/a |
| PDH_0078 | TK | 2 | n/a |
| PDH_0079 | TQ | 2 | n/a |
| PDH_0080 | GL | 2 | n/a |
| PDH_0081 | GP | 2 | n/a |
| PDH_0082 | GV | 2 | n/a |
| PDH_0083 | EF | 2 | n/a |
| PDH_0084 | GF | 2 | n/a |
| PDH_0085 | EL | 2 | n/a |
| PDH_0086 | EA | 2 | n/a |
| PDH_0087 | ES | 2 | n/a |
| PDH_0088 | EP | 2 | n/a |
| PDH_0089 | GA | 2 | n/a |
| PDH_0090 | EV | 2 | n/a |
| PDH_0091 | GG | 2 | n/a |
| PDH_0092 | EG | 2 | n/a |
| PDH_0093 | EW | 2 | n/a |
| PDH_0094 | IE | 2 | n/a |
| PDH_0095 | RE | 2 | n/a |
| PDH_0096 | KE | 2 | n/a |
| PDH_0097 | GD | 2 | n/a |
| PDH_0098 | ID | 2 | n/a |
| PDH_0099 | RD | 2 | n/a |
| PDH_0100 | EE | 2 | n/a |
| PDH_0101 | GE | 2 | n/a |
| PDH_0102 | KD | 2 | n/a |
| PDH_0103 | ED | 2 | n/a |
| PDH_0104 | IG | 2 | n/a |
| PDH_0105 | RG | 2 | n/a |
| PDH_0106 | KG | 2 | n/a |
| PDH_0107 | LD | 2 | n/a |
| PDH_0108 | LH | 2 | n/a |
| PDH_0109 | PD | 2 | n/a |
| PDH_0110 | HD | 2 | n/a |
| PDH_0111 | SY | 2 | n/a |
| PDH_0112 | FY | 2 | n/a |
| PDH_0113 | YY | 2 | n/a |
| PDH_0114 | LY | 2 | n/a |
| PDH_0115 | LT | 2 | n/a |
| PDH_0116 | HP | 2 | n/a |
| PDH_0117 | HT | 2 | n/a |
| PDH_0118 | LP | 2 | n/a |
| PDH_0119 | PT | 2 | n/a |
| PDH_0120 | PP | 2 | n/a |
| PDH_0121 | TE | 2 | n/a |
| PDH_0122 | QE | 2 | n/a |
| PDH_0123 | TD | 2 | n/a |
| PDH_0124 | QD | 2 | n/a |
| PDH_0125 | PG | 2 | n/a |
| PDH_0126 | LG | 2 | n/a |
| PDH_0127 | TG | 2 | n/a |
| PDH_0128 | QG | 2 | n/a |
| PDH_0129 | QP | 2 | n/a |
| PDH_0130 | QT | 2 | n/a |
| PDH_0131 | KT | 2 | n/a |
| PDH_0132 | KP | 2 | n/a |
| PDH_0133 | IP | 2 | n/a |
| PDH_0134 | TP | 2 | n/a |
| PDH_0135 | TT | 2 | n/a |
| PDH_0136 | IT | 2 | n/a |
| PDH_0137 | IH | 2 | n/a |
| PDH_0138 | IY | 2 | n/a |
| PDH_0139 | TH | 2 | n/a |
| PDH_0140 | TY | 2 | n/a |
| PDH_0141 | RR | 2 | n/a |
| PDH_0142 | QL | 2 | n/a |
| PDH_0143 | QQ | 2 | n/a |
| PDH_0144 | PL | 2 | n/a |
| PDH_0145 | RP | 2 | n/a |
| PDH_0146 | PR | 2 | n/a |
| PDH_0147 | RL | 2 | n/a |
| PDH_0148 | QR | 2 | n/a |
| PDH_0149 | PM | 2 | n/a |
| PDH_0150 | TM | 2 | n/a |
| PDH_0151 | RT | 2 | n/a |
| PDH_0152 | RM | 2 | n/a |
| PDH_0153 | SM | 2 | n/a |
| PDH_0154 | QA | 2 | n/a |
| PDH_0155 | RA | 2 | n/a |
| PDH_0156 | QS | 2 | n/a |
| PDH_0157 | QV | 2 | n/a |
| PDH_0158 | RS | 2 | n/a |
| PDH_0159 | QW | 2 | n/a |
| PDH_0160 | RW | 2 | n/a |
| PDH_0161 | RV | 2 | n/a |
| PDH_0162 | WS | 2 | n/a |
| PDH_0163 | WT | 2 | n/a |
| PDH_0164 | TS | 2 | n/a |
| PDH_0165 | WP | 2 | n/a |
| PDH_0166 | SS | 2 | n/a |
| PDH_0167 | WV | 2 | n/a |
| PDH_0168 | WF | 2 | n/a |
| PDH_0169 | RF | 2 | n/a |
| PDH_0170 | WA | 2 | n/a |
| PDH_0171 | WD | 2 | n/a |
| PDH_0172 | WY | 2 | n/a |
| PDH_0173 | WQ | 2 | n/a |
| PDH_0174 | WE | 2 | n/a |
| PDH_0175 | WH | 2 | n/a |
| PDH_0176 | YK | 2 | n/a |
| PDH_0177 | FK | 2 | n/a |
| PDH_0178 | DK | 2 | n/a |
| PDH_0179 | HK | 2 | n/a |
| PDH_0180 | LW | 2 | n/a |
| PDH_0181 | PW | 2 | n/a |
| PDH_0182 | HW | 2 | n/a |
| PDH_0183 | WI | 2 | n/a |
| PDH_0184 | WG | 2 | n/a |
| PDH_0185 | WL | 2 | n/a |
| PDH_0186 | WR | 2 | n/a |
| PDH_0187 | YS | 2 | n/a |
| PDH_0188 | LS | 2 | n/a |
| PDH_0189 | HS | 2 | n/a |
| PDH_0190 | FS | 2 | n/a |
| PDH_0191 | PS | 2 | n/a |
| PDH_0192 | VS | 2 | n/a |
| PDH_0193 | GI | 2 | n/a |
| PDH_0194 | HI | 2 | n/a |
| PDH_0195 | RI | 2 | n/a |
| PDH_0196 | DI | 2 | n/a |
| PDH_0197 | TF | 2 | n/a |
| PDH_0198 | TL | 2 | n/a |
| PDH_0199 | TV | 2 | n/a |
| PDH_0200 | TA | 2 | n/a |
| PDH_0201 | PA | 2 | n/a |
| PDH_0202 | HA | 2 | n/a |
| PDH_0203 | DA | 2 | n/a |
| PDH_0204 | AA | 2 | n/a |
| PDH_0205 | MR | 2 | n/a |
| PDH_0206 | MA | 2 | n/a |
| PDH_0207 | MD | 2 | n/a |
| PDH_0208 | MP | 2 | n/a |
| PDH_0209 | MH | 2 | n/a |
| PDH_0210 | MG | 2 | n/a |
| PDH_0211 | VR | 2 | n/a |
| PDH_0212 | ER | 2 | n/a |
| PDH_0213 | LR | 2 | n/a |
| PDH_0214 | VAL | 3 | n/a |
| PDH_0215 | VAR | 3 | n/a |
| PDH_0216 | VAI | 3 | n/a |
| PDH_0217 | VAA | 3 | n/a |
| PDH_0218 | VAT | 3 | n/a |
| PDH_0219 | VAP | 3 | n/a |
| PDH_0220 | VAV | 3 | n/a |
| PDH_0221 | VAG | 3 | n/a |
| PDH_0222 | VAS | 3 | n/a |
| PDH_0223 | VVL | 3 | n/a |
| PDH_0224 | VEL | 3 | n/a |
| PDH_0225 | REL | 3 | n/a |
| PDH_0226 | TLL | 3 | n/a |
| PDH_0227 | WEL | 3 | n/a |
| PDH_0228 | RLL | 3 | n/a |
| PDH_0229 | TQL | 3 | n/a |
| PDH_0230 | RVL | 3 | n/a |
| PDH_0231 | GLL | 3 | n/a |
| PDH_0232 | TEL | 3 | n/a |
| PDH_0233 | GVL | 3 | n/a |
| PDH_0234 | LQL | 3 | n/a |
| PDH_0235 | MEL | 3 | n/a |
| PDH_0236 | SLL | 3 | n/a |
| PDH_0237 | LVL | 3 | n/a |
| PDH_0238 | MQL | 3 | n/a |
| PDH_0239 | AVL | 3 | n/a |
| PDH_0240 | AQL | 3 | n/a |
| PDH_0241 | SQL | 3 | n/a |
| PDH_0242 | GQL | 3 | n/a |
| PDH_0243 | LEL | 3 | n/a |
| PDH_0244 | TVL | 3 | n/a |
| PDH_0245 | RQL | 3 | n/a |
| PDH_0246 | LLL | 3 | n/a |
| PDH_0247 | VQL | 3 | n/a |
| PDH_0248 | ALL | 3 | n/a |
| PDH_0249 | AEL | 3 | n/a |
| PDH_0250 | WLL | 3 | n/a |
| PDH_0251 | WVL | 3 | n/a |
| PDH_0252 | SEL | 3 | n/a |
| PDH_0253 | VLL | 3 | n/a |
| PDH_0254 | MVL | 3 | n/a |
| PDH_0255 | GEL | 3 | n/a |
| PDH_0256 | MLL | 3 | n/a |
| PDH_0257 | SVL | 3 | n/a |
| PDH_0258 | WQL | 3 | n/a |
| PDH_0259 | ISG | 3 | n/a |
| PDH_0260 | DSG | 3 | n/a |
| PDH_0261 | VPG | 3 | n/a |
| PDH_0262 | VSG | 3 | n/a |
| PDH_0263 | GAG | 3 | n/a |
| PDH_0264 | IPG | 3 | n/a |
| PDH_0265 | APG | 3 | n/a |
| PDH_0266 | TSG | 3 | n/a |
| PDH_0267 | DPG | 3 | n/a |
| PDH_0268 | LSG | 3 | n/a |
| PDH_0269 | LAG | 3 | n/a |
| PDH_0270 | NPG | 3 | n/a |
| PDH_0271 | PAG | 3 | n/a |
| PDH_0272 | SAG | 3 | n/a |
| PDH_0273 | ASG | 3 | n/a |
| PDH_0274 | RPG | 3 | n/a |
| PDH_0275 | HPG | 3 | n/a |
| PDH_0276 | GSG | 3 | n/a |
| PDH_0277 | GPG | 3 | n/a |
| PDH_0278 | IAG | 3 | n/a |
| PDH_0279 | LPG | 3 | n/a |
| PDH_0280 | AAG | 3 | n/a |
| PDH_0281 | TPG | 3 | n/a |
| PDH_0282 | PSG | 3 | n/a |
| PDH_0283 | PPG | 3 | n/a |
| PDH_0284 | SPG | 3 | n/a |
| PDH_0285 | RAG | 3 | n/a |
| PDH_0286 | HAG | 3 | n/a |
| PDH_0287 | SSG | 3 | n/a |
| PDH_0288 | HSG | 3 | n/a |
| PDH_0289 | RSG | 3 | n/a |
| PDH_0290 | TAG | 3 | n/a |
| PDH_0291 | DAG | 3 | n/a |
| PDH_0292 | NAG | 3 | n/a |
| PDH_0293 | NSG | 3 | n/a |
| PDH_0294 | GTY | 3 | n/a |
| PDH_0295 | ITY | 3 | n/a |
| PDH_0296 | LTY | 3 | n/a |
| PDH_0297 | ISY | 3 | n/a |
| PDH_0298 | GAY | 3 | n/a |
| PDH_0299 | LAY | 3 | n/a |
| PDH_0300 | HSY | 3 | n/a |
| PDH_0301 | AAY | 3 | n/a |
| PDH_0302 | ASY | 3 | n/a |
| PDH_0303 | TAY | 3 | n/a |
| PDH_0304 | NAY | 3 | n/a |
| PDH_0305 | HTY | 3 | n/a |
| PDH_0306 | RTY | 3 | n/a |
| PDH_0307 | PTY | 3 | n/a |
| PDH_0308 | RAY | 3 | n/a |
| PDH_0309 | ATY | 3 | n/a |
| PDH_0310 | STY | 3 | n/a |
| PDH_0311 | DSY | 3 | n/a |
| PDH_0312 | GSY | 3 | n/a |
| PDH_0313 | IAY | 3 | n/a |
| PDH_0314 | PAY | 3 | n/a |
| PDH_0315 | VTY | 3 | n/a |
| PDH_0316 | PSY | 3 | n/a |
| PDH_0317 | TTY | 3 | n/a |
| PDH_0318 | VAY | 3 | n/a |
| PDH_0319 | NTY | 3 | n/a |
| PDH_0320 | DAY | 3 | n/a |
| PDH_0321 | TSY | 3 | n/a |
| PDH_0322 | DTY | 3 | n/a |
| PDH_0323 | RSY | 3 | n/a |
| PDH_0324 | SSY | 3 | n/a |
| PDH_0325 | NSY | 3 | n/a |
| PDH_0326 | SAY | 3 | n/a |
| PDH_0327 | HAY | 3 | n/a |
| PDH_0328 | LSY | 3 | n/a |
| PDH_0329 | VSY | 3 | n/a |
| PDH_0330 | IVL | 3 | n/a |
| PDH_0331 | KWL | 3 | n/a |
| PDH_0332 | KVL | 3 | n/a |
| PDH_0333 | PLL | 3 | n/a |
| PDH_0334 | LGL | 3 | n/a |
| PDH_0335 | QWL | 3 | n/a |
| PDH_0336 | EGL | 3 | n/a |
| PDH_0337 | EWL | 3 | n/a |
| PDH_0338 | EVL | 3 | n/a |
| PDH_0339 | QLL | 3 | n/a |
| PDH_0340 | AGL | 3 | n/a |
| PDH_0341 | VWL | 3 | n/a |
| PDH_0342 | ELL | 3 | n/a |
| PDH_0343 | KGL | 3 | n/a |
| PDH_0344 | ILL | 3 | n/a |
| PDH_0345 | IGL | 3 | n/a |
| PDH_0346 | AWL | 3 | n/a |
| PDH_0347 | LWL | 3 | n/a |
| PDH_0348 | QGL | 3 | n/a |
| PDH_0349 | PVL | 3 | n/a |
| PDH_0350 | VGL | 3 | n/a |
| PDH_0351 | IWL | 3 | n/a |
| PDH_0352 | KLL | 3 | n/a |
| PDH_0353 | PGL | 3 | n/a |
| PDH_0354 | PWL | 3 | n/a |
| PDH_0355 | QVL | 3 | n/a |
| PDH_0356 | TGL | 3 | n/a |
| PDH_0357 | TWL | 3 | n/a |
| PDH_0358 | PAD | 3 | n/a |
| PDH_0359 | PAL | 3 | n/a |
| PDH_0360 | PAA | 3 | n/a |
| PDH_0361 | PAH | 3 | n/a |
| PDH_0362 | PAP | 3 | n/a |
| PDH_0363 | PAS | 3 | n/a |
| PDH_0364 | PAF | 3 | n/a |
| PDH_0365 | PAV | 3 | n/a |
| PDH_0366 | IQL | 3 | n/a |
| PDH_0367 | KRL | 3 | n/a |
| PDH_0368 | PRL | 3 | n/a |
| PDH_0369 | KQL | 3 | n/a |
| PDH_0370 | QRL | 3 | n/a |
| PDH_0371 | KEL | 3 | n/a |
| PDH_0372 | EEL | 3 | n/a |
| PDH_0373 | PEL | 3 | n/a |
| PDH_0374 | VRL | 3 | n/a |
| PDH_0375 | QEL | 3 | n/a |
| PDH_0376 | LRL | 3 | n/a |
| PDH_0377 | IEL | 3 | n/a |
| PDH_0378 | QQL | 3 | n/a |
| PDH_0379 | IRL | 3 | n/a |
| PDH_0380 | EQL | 3 | n/a |
| PDH_0381 | ERL | 3 | n/a |
| PDH_0382 | TRL | 3 | n/a |
| PDH_0383 | ARL | 3 | n/a |
| PDH_0384 | PQL | 3 | n/a |
| PDH_0385 | HSS | 3 | n/a |
| PDH_0386 | VST | 3 | n/a |
| PDH_0387 | HSA | 3 | n/a |
| PDH_0388 | YSG | 3 | n/a |
| PDH_0389 | ASS | 3 | n/a |
| PDH_0390 | HST | 3 | n/a |
| PDH_0391 | VSS | 3 | n/a |
| PDH_0392 | YSA | 3 | n/a |
| PDH_0393 | DST | 3 | n/a |
| PDH_0394 | PST | 3 | n/a |
| PDH_0395 | AST | 3 | n/a |
| PDH_0396 | FSS | 3 | n/a |
| PDH_0397 | LST | 3 | n/a |
| PDH_0398 | SST | 3 | n/a |
| PDH_0399 | FST | 3 | n/a |
| PDH_0400 | FSG | 3 | n/a |
| PDH_0401 | SSS | 3 | n/a |
| PDH_0402 | LSA | 3 | n/a |
| PDH_0403 | LSS | 3 | n/a |
| PDH_0404 | PSA | 3 | n/a |
| PDH_0405 | DSA | 3 | n/a |
| PDH_0406 | ASA | 3 | n/a |
| PDH_0407 | SSA | 3 | n/a |
| PDH_0408 | DSS | 3 | n/a |
| PDH_0409 | PSS | 3 | n/a |
| PDH_0410 | YSS | 3 | n/a |
| PDH_0411 | FSA | 3 | n/a |
| PDH_0412 | YST | 3 | n/a |
| PDH_0413 | VSA | 3 | n/a |
| PDH_0414 | SGA | 3 | n/a |
| PDH_0415 | AGD | 3 | n/a |
| PDH_0416 | LGA | 3 | n/a |
| PDH_0417 | SGY | 3 | n/a |
| PDH_0418 | SGD | 3 | n/a |
| PDH_0419 | FGY | 3 | n/a |
| PDH_0420 | DGY | 3 | n/a |
| PDH_0421 | LGS | 3 | n/a |
| PDH_0422 | FGS | 3 | n/a |
| PDH_0423 | DGS | 3 | n/a |
| PDH_0424 | YGS | 3 | n/a |
| PDH_0425 | YGA | 3 | n/a |
| PDH_0426 | VGD | 3 | n/a |
| PDH_0427 | PGS | 3 | n/a |
| PDH_0428 | VGY | 3 | n/a |
| PDH_0429 | VGS | 3 | n/a |
| PDH_0430 | VGA | 3 | n/a |
| PDH_0431 | LGD | 3 | n/a |
| PDH_0432 | AGY | 3 | n/a |
| PDH_0433 | LGY | 3 | n/a |
| PDH_0434 | HGD | 3 | n/a |
| PDH_0435 | HGA | 3 | n/a |
| PDH_0436 | PGA | 3 | n/a |
| PDH_0437 | YGD | 3 | n/a |
| PDH_0438 | PGD | 3 | n/a |
| PDH_0439 | YGY | 3 | n/a |
| PDH_0440 | PGY | 3 | n/a |
| PDH_0441 | SGS | 3 | n/a |
| PDH_0442 | HGY | 3 | n/a |
| PDH_0443 | FGD | 3 | n/a |
| PDH_0444 | FGA | 3 | n/a |
| PDH_0445 | AGS | 3 | n/a |
| PDH_0446 | DGD | 3 | n/a |
| PDH_0447 | DGA | 3 | n/a |
| PDH_0448 | HGS | 3 | n/a |
| PDH_0449 | AGA | 3 | n/a |
| PDH_0450 | SGV | 3 | n/a |
| PDH_0451 | LGV | 3 | n/a |
| PDH_0452 | AGG | 3 | n/a |
| PDH_0453 | SGG | 3 | n/a |
| PDH_0454 | DGV | 3 | n/a |
| PDH_0455 | PGV | 3 | n/a |
| PDH_0456 | HGV | 3 | n/a |
| PDH_0457 | YGV | 3 | n/a |
| PDH_0458 | LGG | 3 | n/a |
| PDH_0459 | VGG | 3 | n/a |
| PDH_0460 | VGV | 3 | n/a |
| PDH_0461 | FGV | 3 | n/a |
| PDH_0462 | PGG | 3 | n/a |
| PDH_0463 | YGG | 3 | n/a |
| PDH_0464 | HGG | 3 | n/a |
| PDH_0465 | DGG | 3 | n/a |
| PDH_0466 | AGV | 3 | n/a |
| PDH_0467 | FGG | 3 | n/a |
| PDH_0468 | HSD | 3 | n/a |
| PDH_0469 | YSD | 3 | n/a |
| PDH_0470 | ASD | 3 | n/a |
| PDH_0471 | FSY | 3 | n/a |
| PDH_0472 | FSD | 3 | n/a |
| PDH_0473 | SSD | 3 | n/a |
| PDH_0474 | VSD | 3 | n/a |
| PDH_0475 | PSD | 3 | n/a |
| PDH_0476 | LSD | 3 | n/a |
| PDH_0477 | YSY | 3 | n/a |
| PDH_0478 | DSD | 3 | n/a |
| PDH_0479 | SRL | 3 | n/a |
| PDH_0480 | DQL | 3 | n/a |
| PDH_0481 | FRL | 3 | n/a |
| PDH_0482 | YRL | 3 | n/a |
| PDH_0483 | HQL | 3 | n/a |
| PDH_0484 | NQL | 3 | n/a |
| PDH_0485 | NRL | 3 | n/a |
| PDH_0486 | FQL | 3 | n/a |
| PDH_0487 | DRL | 3 | n/a |
| PDH_0488 | HRL | 3 | n/a |
| PDH_0489 | YQL | 3 | n/a |
| PDH_0490 | VSW | 3 | n/a |
| PDH_0491 | PSW | 3 | n/a |
| PDH_0492 | HSW | 3 | n/a |
| PDH_0493 | NSW | 3 | n/a |
| PDH_0494 | FSW | 3 | n/a |
| PDH_0495 | ASW | 3 | n/a |
| PDH_0496 | TSW | 3 | n/a |
| PDH_0497 | LSW | 3 | n/a |
| PDH_0498 | DSW | 3 | n/a |
| PDH_0499 | ISW | 3 | n/a |
| PDH_0500 | SSW | 3 | n/a |
| PDH_0501 | YSW | 3 | n/a |
| PDH_0502 | SGW | 3 | n/a |
| PDH_0503 | FGW | 3 | n/a |
| PDH_0504 | LGW | 3 | n/a |
| PDH_0505 | AGW | 3 | n/a |
| PDH_0506 | VGW | 3 | n/a |
| PDH_0507 | YGW | 3 | n/a |
| PDH_0508 | PGW | 3 | n/a |
| PDH_0509 | DGW | 3 | n/a |
| PDH_0510 | HGW | 3 | n/a |
| PDH_0511 | IGD | 3 | n/a |
| PDH_0512 | GGA | 3 | n/a |
| PDH_0513 | IGG | 3 | n/a |
| PDH_0514 | GGD | 3 | n/a |
| PDH_0515 | GGV | 3 | n/a |
| PDH_0516 | RGD | 3 | n/a |
| PDH_0517 | TGV | 3 | n/a |
| PDH_0518 | RGV | 3 | n/a |
| PDH_0519 | GGG | 3 | n/a |
| PDH_0520 | IGA | 3 | n/a |
| PDH_0521 | IGV | 3 | n/a |
| PDH_0522 | RGG | 3 | n/a |
| PDH_0523 | RGA | 3 | n/a |
| PDH_0524 | TGD | 3 | n/a |
| PDH_0525 | TGA | 3 | n/a |
| PDH_0526 | TGG | 3 | n/a |
| PDH_0527 | NSA | 3 | n/a |
| PDH_0528 | NSD | 3 | n/a |
| PDH_0529 | TSD | 3 | n/a |
| PDH_0530 | TSA | 3 | n/a |
| PDH_0531 | ISA | 3 | n/a |
| PDH_0532 | ISD | 3 | n/a |
| PDH_0533 | HYD | 3 | n/a |
| PDH_0534 | HYG | 3 | n/a |
| PDH_0535 | FYD | 3 | n/a |
| PDH_0536 | FYG | 3 | n/a |
| PDH_0537 | LYA | 3 | n/a |
| PDH_0538 | LYD | 3 | n/a |
| PDH_0539 | VYA | 3 | n/a |
| PDH_0540 | VYD | 3 | n/a |
| PDH_0541 | TYA | 3 | n/a |
| PDH_0542 | LYG | 3 | n/a |
| PDH_0543 | DYD | 3 | n/a |
| PDH_0544 | HYA | 3 | n/a |
| PDH_0545 | TYD | 3 | n/a |
| PDH_0546 | TYG | 3 | n/a |
| PDH_0547 | YYA | 3 | n/a |
| PDH_0548 | DYG | 3 | n/a |
| PDH_0549 | YYD | 3 | n/a |
| PDH_0550 | NYG | 3 | n/a |
| PDH_0551 | NYD | 3 | n/a |
| PDH_0552 | PYG | 3 | n/a |
| PDH_0553 | YYG | 3 | n/a |
| PDH_0554 | PYD | 3 | n/a |
| PDH_0555 | NYA | 3 | n/a |
| PDH_0556 | FYA | 3 | n/a |
| PDH_0557 | PYA | 3 | n/a |
| PDH_0558 | VYG | 3 | n/a |
| PDH_0559 | AYD | 3 | n/a |
| PDH_0560 | IYG | 3 | n/a |
| PDH_0561 | AYA | 3 | n/a |
| PDH_0562 | SYG | 3 | n/a |
| PDH_0563 | IYD | 3 | n/a |
| PDH_0564 | IYA | 3 | n/a |
| PDH_0565 | AYG | 3 | n/a |
| PDH_0566 | DYA | 3 | n/a |
| PDH_0567 | SYD | 3 | n/a |
| PDH_0568 | SYA | 3 | n/a |
| PDH_0569 | TSE | 3 | n/a |
| PDH_0570 | HSE | 3 | n/a |
| PDH_0571 | YSE | 3 | n/a |
| PDH_0572 | ASE | 3 | n/a |
| PDH_0573 | NSE | 3 | n/a |
| PDH_0574 | FSE | 3 | n/a |
| PDH_0575 | DSE | 3 | n/a |
| PDH_0576 | ISE | 3 | n/a |
| PDH_0577 | SSE | 3 | n/a |
| PDH_0578 | VSE | 3 | n/a |
| PDH_0579 | PSE | 3 | n/a |
| PDH_0580 | LSE | 3 | n/a |
| PDH_0581 | EWP | 3 | n/a |
| PDH_0582 | PWP | 3 | n/a |
| PDH_0583 | KWA | 3 | n/a |
| PDH_0584 | IWP | 3 | n/a |
| PDH_0585 | LWA | 3 | n/a |
| PDH_0586 | LWV | 3 | n/a |
| PDH_0587 | AWV | 3 | n/a |
| PDH_0588 | AWA | 3 | n/a |
| PDH_0589 | PWA | 3 | n/a |
| PDH_0590 | QWP | 3 | n/a |
| PDH_0591 | PWV | 3 | n/a |
| PDH_0592 | TWV | 3 | n/a |
| PDH_0593 | TWP | 3 | n/a |
| PDH_0594 | QWA | 3 | n/a |
| PDH_0595 | KWP | 3 | n/a |
| PDH_0596 | QWV | 3 | n/a |
| PDH_0597 | EWV | 3 | n/a |
| PDH_0598 | VWA | 3 | n/a |
| PDH_0599 | AWP | 3 | n/a |
| PDH_0600 | VWV | 3 | n/a |
| PDH_0601 | TWA | 3 | n/a |
| PDH_0602 | EWA | 3 | n/a |
| PDH_0603 | IWV | 3 | n/a |
| PDH_0604 | VWP | 3 | n/a |
| PDH_0605 | IWA | 3 | n/a |
| PDH_0606 | LWP | 3 | n/a |
| PDH_0607 | KWV | 3 | n/a |
| PDH_0608 | HDY | 3 | n/a |
| PDH_0609 | IVY | 3 | n/a |
| PDH_0610 | PVY | 3 | n/a |
| PDH_0611 | AVY | 3 | n/a |
| PDH_0612 | GVY | 3 | n/a |
| PDH_0613 | LVY | 3 | n/a |
| PDH_0614 | GDY | 3 | n/a |
| PDH_0615 | ADY | 3 | n/a |
| PDH_0616 | VVY | 3 | n/a |
| PDH_0617 | NVY | 3 | n/a |
| PDH_0618 | SDY | 3 | n/a |
| PDH_0619 | RVY | 3 | n/a |
| PDH_0620 | LDY | 3 | n/a |
| PDH_0621 | HVY | 3 | n/a |
| PDH_0622 | PDY | 3 | n/a |
| PDH_0623 | RDY | 3 | n/a |
| PDH_0624 | SVY | 3 | n/a |
| PDH_0625 | IDY | 3 | n/a |
| PDH_0626 | DDY | 3 | n/a |
| PDH_0627 | NDY | 3 | n/a |
| PDH_0628 | VDY | 3 | n/a |
| PDH_0629 | DVY | 3 | n/a |
| PDH_0630 | TVY | 3 | n/a |
| PDH_0631 | TDY | 3 | n/a |
| PDH_0632 | GKL | 3 | n/a |
| PDH_0633 | GIL | 3 | n/a |
| PDH_0634 | GRL | 3 | n/a |
| PDH_0635 | GGL | 3 | n/a |
| PDH_0636 | GAL | 3 | n/a |
| PDH_0637 | GTL | 3 | n/a |
| PDH_0638 | LRG | 3 | n/a |
| PDH_0639 | DTG | 3 | n/a |
| PDH_0640 | ARG | 3 | n/a |
| PDH_0641 | YIG | 3 | n/a |
| PDH_0642 | ITG | 3 | n/a |
| PDH_0643 | PIG | 3 | n/a |
| PDH_0644 | DIG | 3 | n/a |
| PDH_0645 | ATG | 3 | n/a |
| PDH_0646 | STG | 3 | n/a |
| PDH_0647 | HTG | 3 | n/a |
| PDH_0648 | VRG | 3 | n/a |
| PDH_0649 | YRG | 3 | n/a |
| PDH_0650 | NIG | 3 | n/a |
| PDH_0651 | VIG | 3 | n/a |
| PDH_0652 | IRG | 3 | n/a |
| PDH_0653 | LTG | 3 | n/a |
| PDH_0654 | SRG | 3 | n/a |
| PDH_0655 | VTG | 3 | n/a |
| PDH_0656 | AIG | 3 | n/a |
| PDH_0657 | IIG | 3 | n/a |
| PDH_0658 | FTG | 3 | n/a |
| PDH_0659 | HIG | 3 | n/a |
| PDH_0660 | HRG | 3 | n/a |
| PDH_0661 | PTG | 3 | n/a |
| PDH_0662 | YTG | 3 | n/a |
| PDH_0663 | PRG | 3 | n/a |
| PDH_0664 | TIG | 3 | n/a |
| PDH_0665 | DRG | 3 | n/a |
| PDH_0666 | TRG | 3 | n/a |
| PDH_0667 | FIG | 3 | n/a |
| PDH_0668 | NTG | 3 | n/a |
| PDH_0669 | FRG | 3 | n/a |
| PDH_0670 | LIG | 3 | n/a |
| PDH_0671 | NRG | 3 | n/a |
| PDH_0672 | TTG | 3 | n/a |
| PDH_0673 | SIG | 3 | n/a |
| PDH_0674 | EAG | 3 | n/a |
| PDH_0675 | KAV | 3 | n/a |
| PDH_0676 | IAD | 3 | n/a |
| PDH_0677 | IAV | 3 | n/a |
| PDH_0678 | KAD | 3 | n/a |
| PDH_0679 | QAA | 3 | n/a |
| PDH_0680 | LAA | 3 | n/a |
| PDH_0681 | QAD | 3 | n/a |
| PDH_0682 | AAD | 3 | n/a |
| PDH_0683 | AAA | 3 | n/a |
| PDH_0684 | LAD | 3 | n/a |
| PDH_0685 | VAD | 3 | n/a |
| PDH_0686 | TAA | 3 | n/a |
| PDH_0687 | TAD | 3 | n/a |
| PDH_0688 | TAV | 3 | n/a |
| PDH_0689 | EAA | 3 | n/a |
| PDH_0690 | AAV | 3 | n/a |
| PDH_0691 | QAV | 3 | n/a |
| PDH_0692 | EAV | 3 | n/a |
| PDH_0693 | LAV | 3 | n/a |
| PDH_0694 | QAG | 3 | n/a |
| PDH_0695 | KAA | 3 | n/a |
| PDH_0696 | IAA | 3 | n/a |
| PDH_0697 | KAG | 3 | n/a |
| PDH_0698 | EAD | 3 | n/a |
| PDH_0699 | WVG | 3 | n/a |
| PDH_0700 | VFG | 3 | n/a |
| PDH_0701 | SFG | 3 | n/a |
| PDH_0702 | RFG | 3 | n/a |
| PDH_0703 | WAG | 3 | n/a |
| PDH_0704 | WFG | 3 | n/a |
| PDH_0705 | SVG | 3 | n/a |
| PDH_0706 | TVG | 3 | n/a |
| PDH_0707 | GFG | 3 | n/a |
| PDH_0708 | MVG | 3 | n/a |
| PDH_0709 | MFG | 3 | n/a |
| PDH_0710 | LVG | 3 | n/a |
| PDH_0711 | WSG | 3 | n/a |
| PDH_0712 | AFG | 3 | n/a |
| PDH_0713 | MAG | 3 | n/a |
| PDH_0714 | LFG | 3 | n/a |
| PDH_0715 | MSG | 3 | n/a |
| PDH_0716 | VVG | 3 | n/a |
| PDH_0717 | RVG | 3 | n/a |
| PDH_0718 | AVG | 3 | n/a |
| PDH_0719 | GVG | 3 | n/a |
| PDH_0720 | TFG | 3 | n/a |
| PDH_0721 | DGI | 3 | n/a |
| PDH_0722 | LGI | 3 | n/a |
| PDH_0723 | SGI | 3 | n/a |
| PDH_0724 | HGI | 3 | n/a |
| PDH_0725 | PGI | 3 | n/a |
| PDH_0726 | VGI | 3 | n/a |
| PDH_0727 | YGI | 3 | n/a |
| PDH_0728 | FGI | 3 | n/a |
| PDH_0729 | AGI | 3 | n/a |
| PDH_0730 | DVD | 3 | n/a |
| PDH_0731 | FVA | 3 | n/a |
| PDH_0732 | DVA | 3 | n/a |
| PDH_0733 | YVD | 3 | n/a |
| PDH_0734 | YVA | 3 | n/a |
| PDH_0735 | DVG | 3 | n/a |
| PDH_0736 | HVG | 3 | n/a |
| PDH_0737 | VVD | 3 | n/a |
| PDH_0738 | HVD | 3 | n/a |
| PDH_0739 | VVA | 3 | n/a |
| PDH_0740 | IVA | 3 | n/a |
| PDH_0741 | AVD | 3 | n/a |
| PDH_0742 | YVG | 3 | n/a |
| PDH_0743 | TVD | 3 | n/a |
| PDH_0744 | FVG | 3 | n/a |
| PDH_0745 | FVD | 3 | n/a |
| PDH_0746 | TVA | 3 | n/a |
| PDH_0747 | PVG | 3 | n/a |
| PDH_0748 | PVA | 3 | n/a |
| PDH_0749 | AVA | 3 | n/a |
| PDH_0750 | PVD | 3 | n/a |
| PDH_0751 | NVG | 3 | n/a |
| PDH_0752 | IVD | 3 | n/a |
| PDH_0753 | HVA | 3 | n/a |
| PDH_0754 | SVA | 3 | n/a |
| PDH_0755 | SVD | 3 | n/a |
| PDH_0756 | IVG | 3 | n/a |
| PDH_0757 | NVA | 3 | n/a |
| PDH_0758 | LVD | 3 | n/a |
| PDH_0759 | LVA | 3 | n/a |
| PDH_0760 | NVD | 3 | n/a |
| PDH_0761 | AYY | 3 | n/a |
| PDH_0762 | LFY | 3 | n/a |
| PDH_0763 | RFY | 3 | n/a |
| PDH_0764 | IFY | 3 | n/a |
| PDH_0765 | TYY | 3 | n/a |
| PDH_0766 | RYY | 3 | n/a |
| PDH_0767 | PYY | 3 | n/a |
| PDH_0768 | VYY | 3 | n/a |
| PDH_0769 | SFY | 3 | n/a |
| PDH_0770 | GYY | 3 | n/a |
| PDH_0771 | GFY | 3 | n/a |
| PDH_0772 | DFY | 3 | n/a |
| PDH_0773 | VFY | 3 | n/a |
| PDH_0774 | HYY | 3 | n/a |
| PDH_0775 | SYY | 3 | n/a |
| PDH_0776 | PFY | 3 | n/a |
| PDH_0777 | LYY | 3 | n/a |
| PDH_0778 | IYY | 3 | n/a |
| PDH_0779 | TFY | 3 | n/a |
| PDH_0780 | NFY | 3 | n/a |
| PDH_0781 | HFY | 3 | n/a |
| PDH_0782 | AFY | 3 | n/a |
| PDH_0783 | DYY | 3 | n/a |
| PDH_0784 | NYY | 3 | n/a |
| PDH_0785 | VVV | 3 | n/a |
| PDH_0786 | VVF | 3 | n/a |
| PDH_0787 | VVP | 3 | n/a |
| PDH_0788 | VVH | 3 | n/a |
| PDH_0789 | VVS | 3 | n/a |
| PDH_0790 | GDL | 3 | n/a |
| PDH_0791 | SAL | 3 | n/a |
| PDH_0792 | RAL | 3 | n/a |
| PDH_0793 | RGL | 3 | n/a |
| PDH_0794 | IAL | 3 | n/a |
| PDH_0795 | LDL | 3 | n/a |
| PDH_0796 | TDL | 3 | n/a |
| PDH_0797 | ADL | 3 | n/a |
| PDH_0798 | VDL | 3 | n/a |
| PDH_0799 | IDL | 3 | n/a |
| PDH_0800 | SDL | 3 | n/a |
| PDH_0801 | TAL | 3 | n/a |
| PDH_0802 | RDL | 3 | n/a |
| PDH_0803 | AAL | 3 | n/a |
| PDH_0804 | SGL | 3 | n/a |
| PDH_0805 | PDL | 3 | n/a |
| PDH_0806 | LAL | 3 | n/a |
| PDH_0807 | AGE | 3 | n/a |
| PDH_0808 | SGE | 3 | n/a |
| PDH_0809 | HGE | 3 | n/a |
| PDH_0810 | LGE | 3 | n/a |
| PDH_0811 | VGE | 3 | n/a |
| PDH_0812 | PGE | 3 | n/a |
| PDH_0813 | YGE | 3 | n/a |
| PDH_0814 | DGE | 3 | n/a |
| PDH_0815 | FGE | 3 | n/a |
| PDH_0816 | SDG | 3 | n/a |
| PDH_0817 | NDG | 3 | n/a |
| PDH_0818 | GDG | 3 | n/a |
| PDH_0819 | HDG | 3 | n/a |
| PDH_0820 | ADG | 3 | n/a |
| PDH_0821 | TDG | 3 | n/a |
| PDH_0822 | IDG | 3 | n/a |
| PDH_0823 | DDG | 3 | n/a |
| PDH_0824 | VDG | 3 | n/a |
| PDH_0825 | RDG | 3 | n/a |
| PDH_0826 | LDG | 3 | n/a |
| PDH_0827 | PDG | 3 | n/a |
| PDH_0828 | RHG | 3 | n/a |
| PDH_0829 | RLG | 3 | n/a |
| PDH_0830 | RYG | 3 | n/a |
| PDH_0831 | DLY | 3 | n/a |
| PDH_0832 | IWY | 3 | n/a |
| PDH_0833 | LWY | 3 | n/a |
| PDH_0834 | ALY | 3 | n/a |
| PDH_0835 | RWY | 3 | n/a |
| PDH_0836 | SLY | 3 | n/a |
| PDH_0837 | HLY | 3 | n/a |
| PDH_0838 | ILY | 3 | n/a |
| PDH_0839 | SWY | 3 | n/a |
| PDH_0840 | GLY | 3 | n/a |
| PDH_0841 | RLY | 3 | n/a |
| PDH_0842 | DWY | 3 | n/a |
| PDH_0843 | NLY | 3 | n/a |
| PDH_0844 | VWY | 3 | n/a |
| PDH_0845 | GWY | 3 | n/a |
| PDH_0846 | AWY | 3 | n/a |
| PDH_0847 | HWY | 3 | n/a |
| PDH_0848 | PLY | 3 | n/a |
| PDH_0849 | LLY | 3 | n/a |
| PDH_0850 | TWY | 3 | n/a |
| PDH_0851 | TLY | 3 | n/a |
| PDH_0852 | NWY | 3 | n/a |
| PDH_0853 | VLY | 3 | n/a |
| PDH_0854 | PWY | 3 | n/a |
| PDH_0855 | GSL | 3 | n/a |
| PDH_0856 | ISL | 3 | n/a |
| PDH_0857 | DWL | 3 | n/a |
| PDH_0858 | SSL | 3 | n/a |
| PDH_0859 | TSL | 3 | n/a |
| PDH_0860 | VSL | 3 | n/a |
| PDH_0861 | DSL | 3 | n/a |
| PDH_0862 | HWL | 3 | n/a |
| PDH_0863 | ASL | 3 | n/a |
| PDH_0864 | SWL | 3 | n/a |
| PDH_0865 | NWL | 3 | n/a |
| PDH_0866 | NLL | 3 | n/a |
| PDH_0867 | DLL | 3 | n/a |
| PDH_0868 | RSL | 3 | n/a |
| PDH_0869 | PSL | 3 | n/a |
| PDH_0870 | HLL | 3 | n/a |
| PDH_0871 | GWL | 3 | n/a |
| PDH_0872 | HSL | 3 | n/a |
| PDH_0873 | NSL | 3 | n/a |
| PDH_0874 | LSL | 3 | n/a |
| PDH_0875 | RWL | 3 | n/a |
| PDH_0876 | FDY | 3 | n/a |
| PDH_0877 | YYY | 3 | n/a |
| PDH_0878 | FYY | 3 | n/a |
| PDH_0879 | YDY | 3 | n/a |
| PDH_0880 | LIL | 3 | n/a |
| PDH_0881 | LKL | 3 | n/a |
| PDH_0882 | LTL | 3 | n/a |
| PDH_0883 | YAG | 3 | n/a |
| PDH_0884 | FPG | 3 | n/a |
| PDH_0885 | YPG | 3 | n/a |
| PDH_0886 | FAG | 3 | n/a |
| PDH_0887 | FYH | 3 | n/a |
| PDH_0888 | LYH | 3 | n/a |
| PDH_0889 | IYH | 3 | n/a |
| PDH_0890 | SYH | 3 | n/a |
| PDH_0891 | TYH | 3 | n/a |
| PDH_0892 | YYH | 3 | n/a |
| PDH_0893 | NYH | 3 | n/a |
| PDH_0894 | PYH | 3 | n/a |
| PDH_0895 | AYH | 3 | n/a |
| PDH_0896 | VYH | 3 | n/a |
| PDH_0897 | HYH | 3 | n/a |
| PDH_0898 | DYH | 3 | n/a |
| PDH_0899 | YTAM | 4 | 5639 |
| PDH_0900 | HTAI | 4 | 5640 |
| PDH_0901 | YTAS | 4 | 5641 |
| PDH_0902 | YTAI | 4 | 5642 |
| PDH_0903 | YTAR | 4 | 5643 |
| PDH_0904 | PTAS | 4 | 5644 |
| PDH_0905 | LTAM | 4 | 5645 |
| PDH_0906 | DTAI | 4 | 5646 |
| PDH_0907 | FTAS | 4 | 5647 |
| PDH_0908 | FTAM | 4 | 5648 |
| PDH_0909 | LTAS | 4 | 5649 |
| PDH_0910 | ATAI | 4 | 5650 |
| PDH_0911 | STAI | 4 | 5651 |
| PDH_0912 | FTAR | 4 | 5652 |
| PDH_0913 | DTAM | 4 | 4420 |
| PDH_0914 | STAR | 4 | 5653 |
| PDH_0915 | LTAR | 4 | 5654 |
| PDH_0916 | FTAI | 4 | 5655 |
| PDH_0917 | LTAI | 4 | 5656 |
| PDH_0918 | STAM | 4 | 5657 |
| PDH_0919 | ATAM | 4 | 5658 |
| PDH_0920 | STAS | 4 | 5659 |
| PDH_0921 | ATAR | 4 | 5660 |
| PDH_0922 | HTAS | 4 | 5661 |
| PDH_0923 | HTAM | 4 | 5662 |
| PDH_0924 | VTAI | 4 | 3907 |
| PDH_0925 | DTAR | 4 | 5663 |
| PDH_0926 | HTAR | 4 | 5664 |
| PDH_0927 | ATAS | 4 | 5665 |
| PDH_0928 | VTAM | 4 | 5666 |
| PDH_0929 | PTAR | 4 | 5667 |
| PDH_0930 | DTAS | 4 | 5668 |
| PDH_0931 | VTAS | 4 | 5669 |
| PDH_0932 | PTAM | 4 | 5670 |
| PDH_0933 | VTAR | 4 | 5671 |
| PDH_0934 | PTAI | 4 | 5672 |
| PDH_0935 | LVAT | 4 | 5673 |
| PDH_0936 | LAAT | 4 | 5674 |
| PDH_0937 | MVAT | 4 | 5675 |
| PDH_0938 | TGAT | 4 | 5676 |
| PDH_0939 | AVAT | 4 | 5677 |
| PDH_0940 | VAAT | 4 | 3803 |
| PDH_0941 | PAAT | 4 | 5678 |
| PDH_0942 | KGAT | 4 | 5679 |
| PDH_0943 | EGAT | 4 | 5680 |
| PDH_0944 | PVAT | 4 | 5681 |
| PDH_0945 | AGAT | 4 | 5682 |
| PDH_0946 | QAAT | 4 | 5683 |
| PDH_0947 | AAAT | 4 | 5684 |
| PDH_0948 | VVAT | 4 | 5685 |
| PDH_0949 | VGAT | 4 | 3756 |
| PDH_0950 | TVAT | 4 | 5686 |
| PDH_0951 | EVAT | 4 | 5687 |
| PDH_0952 | LGAT | 4 | 5688 |
| PDH_0953 | KAAT | 4 | 5689 |
| PDH_0954 | MGAT | 4 | 5690 |
| PDH_0955 | PGAT | 4 | 5691 |
| PDH_0956 | QVAT | 4 | 5692 |
| PDH_0957 | KVAT | 4 | 5693 |
| PDH_0958 | EAAT | 4 | 5694 |
| PDH_0959 | TAAT | 4 | 5695 |
| PDH_0960 | MAAT | 4 | 5696 |
| PDH_0961 | QGAT | 4 | 5697 |
| PDH_0962 | RFGA | 4 | 5698 |
| PDH_0963 | MFGE | 4 | 5699 |
| PDH_0964 | MFGA | 4 | 5700 |
| PDH_0965 | VFGG | 4 | 5701 |
| PDH_0966 | RFGE | 4 | 5702 |
| PDH_0967 | MFGV | 4 | 5703 |
| PDH_0968 | VFGA | 4 | 5704 |
| PDH_0969 | VFGE | 4 | 5705 |
| PDH_0970 | VFGV | 4 | 5706 |
| PDH_0971 | MFGG | 4 | 5707 |
| PDH_0972 | LFGV | 4 | 5708 |
| PDH_0973 | SFGE | 4 | 5709 |
| PDH_0974 | SFGA | 4 | 5710 |
| PDH_0975 | RFGG | 4 | 5711 |
| PDH_0976 | SFGV | 4 | 5712 |
| PDH_0977 | LFGA | 4 | 5713 |
| PDH_0978 | SFGG | 4 | 5714 |
| PDH_0979 | LFGG | 4 | 5715 |
| PDH_0980 | LFGE | 4 | 5716 |
| PDH_0981 | WFGE | 4 | 3966 |
| PDH_0982 | WFGG | 4 | 5717 |
| PDH_0983 | WFGV | 4 | 5718 |
| PDH_0984 | WFGA | 4 | 5719 |
| PDH_0985 | TFGG | 4 | 4154 |
| PDH_0986 | TFGE | 4 | 5720 |
| PDH_0987 | AFGV | 4 | 5721 |
| PDH_0988 | AFGA | 4 | 5722 |
| PDH_0989 | GFGV | 4 | 5723 |
| PDH_0990 | GFGA | 4 | 5724 |
| PDH_0991 | GFGG | 4 | 5725 |
| PDH_0992 | TFGV | 4 | 5726 |
| PDH_0993 | AFGE | 4 | 5727 |
| PDH_0994 | TFGA | 4 | 5728 |
| PDH_0995 | RFGV | 4 | 5729 |
| PDH_0996 | AFGG | 4 | 5730 |
| PDH_0997 | GFGE | 4 | 5731 |
| PDH_0998 | AGDY | 4 | 5732 |
| PDH_0999 | PGYY | 4 | 5733 |
| PDH_1000 | VGAY | 4 | 5734 |
| PDH_1001 | HGSY | 4 | 5735 |
| PDH_1002 | SGSY | 4 | 3763 |
| PDH_1003 | PGDY | 4 | 5736 |
| PDH_1004 | LGDY | 4 | 5737 |
| PDH_1005 | DGAY | 4 | 5738 |
| PDH_1006 | FGDY | 4 | 5739 |
| PDH_1007 | LGAY | 4 | 5740 |
| PDH_1008 | DGYY | 4 | 5741 |
| PDH_1009 | VGSY | 4 | 5742 |
| PDH_1010 | YGAY | 4 | 5743 |
| PDH_1011 | FGYY | 4 | 5744 |
| PDH_1012 | DGDY | 4 | 5745 |
| PDH_1013 | AGYY | 4 | 5746 |
| PDH_1014 | YGSY | 4 | 5747 |
| PDH_1015 | VGYY | 4 | 5748 |
| PDH_1016 | AGAY | 4 | 5749 |
| PDH_1017 | DGSY | 4 | 5750 |
| PDH_1018 | HGDY | 4 | 5751 |
| PDH_1019 | FGAY | 4 | 5752 |
| PDH_1020 | HGYY | 4 | 5753 |
| PDH_1021 | YGYY | 4 | 5754 |
| PDH_1022 | SGYY | 4 | 4187 |
| PDH_1023 | SGAY | 4 | 5755 |
| PDH_1024 | AGSY | 4 | 5756 |
| PDH_1025 | HGAY | 4 | 5757 |
| PDH_1026 | PGAY | 4 | 5758 |
| PDH_1027 | PGSY | 4 | 5759 |
| PDH_1028 | LGSY | 4 | 5760 |
| PDH_1029 | VGDY | 4 | 5761 |
| PDH_1030 | SGDY | 4 | 5762 |
| PDH_1031 | LGYY | 4 | 5763 |
| PDH_1032 | FGSY | 4 | 5764 |
| PDH_1033 | YGDY | 4 | 4350 |
| PDH_1034 | YSSV | 4 | 5765 |
| PDH_1035 | YSSI | 4 | 5766 |
| PDH_1036 | YSSS | 4 | 4442 |
| PDH_1037 | YSSR | 4 | 5767 |
| PDH_1038 | YSSP | 4 | 5768 |
| PDH_1039 | YSSA | 4 | 5769 |
| PDH_1040 | YSSL | 4 | 5770 |
| PDH_1041 | YSSG | 4 | 4462 |
| PDH_1042 | YSST | 4 | 5771 |
| PDH_1043 | EVRG | 4 | 5772 |
| PDH_1044 | PVRG | 4 | 5773 |
| PDH_1045 | PVTG | 4 | 5774 |
| PDH_1046 | EVAG | 4 | 5775 |
| PDH_1047 | MVTG | 4 | 5776 |
| PDH_1048 | MVGG | 4 | 5777 |
| PDH_1049 | EVGG | 4 | 3728 |
| PDH_1050 | QVRG | 4 | 5778 |
| PDH_1051 | MVRG | 4 | 4017 |
| PDH_1052 | QVGG | 4 | 5779 |
| PDH_1053 | VVAG | 4 | 5780 |
| PDH_1054 | EVTG | 4 | 5781 |
| PDH_1055 | VVRG | 4 | 5782 |
| PDH_1056 | PVAG | 4 | 5783 |
| PDH_1057 | LVAG | 4 | 5784 |
| PDH_1058 | LVRG | 4 | 5785 |
| PDH_1059 | QVTG | 4 | 5786 |
| PDH_1060 | PVGG | 4 | 5787 |
| PDH_1061 | AVGG | 4 | 5788 |
| PDH_1062 | TVGG | 4 | 5789 |
| PDH_1063 | KVGG | 4 | 5790 |
| PDH_1064 | TVAG | 4 | 5791 |
| PDH_1065 | AVTG | 4 | 5792 |
| PDH_1066 | KVRG | 4 | 5793 |
| PDH_1067 | LVTG | 4 | 5794 |
| PDH_1068 | AVRG | 4 | 5795 |
| PDH_1069 | LVGG | 4 | 5796 |
| PDH_1070 | AVAG | 4 | 4473 |
| PDH_1071 | QVAG | 4 | 5797 |
| PDH_1072 | KVTG | 4 | 5798 |
| PDH_1073 | TVTG | 4 | 5799 |
| PDH_1074 | VVGG | 4 | 5800 |
| PDH_1075 | KVAG | 4 | 5801 |
| PDH_1076 | MVAG | 4 | 5802 |
| PDH_1077 | VVTG | 4 | 5803 |
| PDH_1078 | TVRG | 4 | 5804 |
| PDH_1079 | SDGY | 4 | 5805 |
| PDH_1080 | IDGF | 4 | 5806 |
| PDH_1081 | ADGY | 4 | 5807 |
| PDH_1082 | ADGS | 4 | 5808 |
| PDH_1083 | RDGF | 4 | 5809 |
| PDH_1084 | IDGS | 4 | 5810 |
| PDH_1085 | GDGS | 4 | 5811 |
| PDH_1086 | LDGY | 4 | 5812 |
| PDH_1087 | GDGY | 4 | 5813 |
| PDH_1088 | IDGY | 4 | 5814 |
| PDH_1089 | SDGS | 4 | 5815 |
| PDH_1090 | SDGF | 4 | 5816 |
| PDH_1091 | VDGF | 4 | 5817 |
| PDH_1092 | GDGF | 4 | 5818 |
| PDH_1093 | TDGY | 4 | 5819 |
| PDH_1094 | RDGY | 4 | 4410 |
| PDH_1095 | VDGY | 4 | 5820 |
| PDH_1096 | TDGS | 4 | 5821 |
| PDH_1097 | RDGS | 4 | 5822 |
| PDH_1098 | LDGF | 4 | 5823 |
| PDH_1099 | VDGS | 4 | 5824 |
| PDH_1100 | ADGF | 4 | 5825 |
| PDH_1101 | LDGS | 4 | 5826 |
| PDH_1102 | PDGS | 4 | 5827 |
| PDH_1103 | PDGF | 4 | 5828 |
| PDH_1104 | PDGY | 4 | 5829 |
| PDH_1105 | TDGF | 4 | 5830 |
| PDH_1106 | NYGG | 4 | 5831 |
| PDH_1107 | TYGD | 4 | 5832 |
| PDH_1108 | LYGD | 4 | 5833 |
| PDH_1109 | FYGG | 4 | 5834 |
| PDH_1110 | SYGG | 4 | 5835 |
| PDH_1111 | TYGG | 4 | 5836 |
| PDH_1112 | LYGA | 4 | 5837 |
| PDH_1113 | SYGA | 4 | 5838 |
| PDH_1114 | LYGG | 4 | 5839 |
| PDH_1115 | VYGD | 4 | 5840 |
| PDH_1116 | SYGD | 4 | 5841 |
| PDH_1117 | AYGG | 4 | 5842 |
| PDH_1118 | VYGG | 4 | 5843 |
| PDH_1119 | HYGG | 4 | 5844 |
| PDH_1120 | FYGA | 4 | 5845 |
| PDH_1121 | NYGD | 4 | 5846 |
| PDH_1122 | TYGA | 4 | 5847 |
| PDH_1123 | FYGD | 4 | 5848 |
| PDH_1124 | IYGD | 4 | 5849 |
| PDH_1125 | DYGD | 4 | 4349 |
| PDH_1126 | PYGD | 4 | 5850 |
| PDH_1127 | DYGA | 4 | 5851 |
| PDH_1128 | HYGA | 4 | 5852 |
| PDH_1129 | PYGA | 4 | 5853 |
| PDH_1130 | PYGG | 4 | 5854 |
| PDH_1131 | HYGD | 4 | 5855 |
| PDH_1132 | AYGA | 4 | 5856 |
| PDH_1133 | VYGA | 4 | 5857 |
| PDH_1134 | YYGD | 4 | 5858 |
| PDH_1135 | AYGD | 4 | 5859 |
| PDH_1136 | NYGA | 4 | 5860 |
| PDH_1137 | YYGA | 4 | 5861 |
| PDH_1138 | YYGG | 4 | 5862 |
| PDH_1139 | IYGG | 4 | 5863 |
| PDH_1140 | IYGA | 4 | 5864 |
| PDH_1141 | DYGG | 4 | 4357 |
| PDH_1142 | LMAT | 4 | 5865 |
| PDH_1143 | VTAT | 4 | 5866 |
| PDH_1144 | KMAT | 4 | 5867 |
| PDH_1145 | QMAT | 4 | 5868 |
| PDH_1146 | ETAT | 4 | 5869 |
| PDH_1147 | TTAT | 4 | 5870 |
| PDH_1148 | TMAT | 4 | 5871 |
| PDH_1149 | PTAT | 4 | 5872 |
| PDH_1150 | VMAT | 4 | 5873 |
| PDH_1151 | LTAT | 4 | 5874 |
| PDH_1152 | KTAT | 4 | 5875 |
| PDH_1153 | MMAT | 4 | 5876 |
| PDH_1154 | ATAT | 4 | 5877 |
| PDH_1155 | QTAT | 4 | 5878 |
| PDH_1156 | PMAT | 4 | 5879 |
| PDH_1157 | MTAT | 4 | 5880 |
| PDH_1158 | EMAT | 4 | 4402 |
| PDH_1159 | AMAT | 4 | 5881 |
| PDH_1160 | TYSA | 4 | 5882 |
| PDH_1161 | LYSS | 4 | 5883 |
| PDH_1162 | LYST | 4 | 5884 |
| PDH_1163 | QYSS | 4 | 5885 |
| PDH_1164 | VYST | 4 | 5886 |
| PDH_1165 | VYSS | 4 | 5887 |
| PDH_1166 | AYSA | 4 | 5888 |
| PDH_1167 | PYSG | 4 | 5889 |
| PDH_1168 | PYST | 4 | 5890 |
| PDH_1169 | VYSA | 4 | 5891 |
| PDH_1170 | PYSS | 4 | 5892 |
| PDH_1171 | VYSG | 4 | 5893 |
| PDH_1172 | PYSA | 4 | 5894 |
| PDH_1173 | KYST | 4 | 5895 |
| PDH_1174 | QYST | 4 | 5896 |
| PDH_1175 | TYSG | 4 | 5897 |
| PDH_1176 | TYST | 4 | 5898 |
| PDH_1177 | QYSA | 4 | 5899 |
| PDH_1178 | AYSS | 4 | 5900 |
| PDH_1179 | TYSS | 4 | 5901 |
| PDH_1180 | IYSA | 4 | 5902 |
| PDH_1181 | AYST | 4 | 5903 |
| PDH_1182 | IYSG | 4 | 5904 |
| PDH_1183 | EYSS | 4 | 4479 |
| PDH_1184 | KYSG | 4 | 5905 |
| PDH_1185 | EYSA | 4 | 5906 |
| PDH_1186 | LYSG | 4 | 5907 |
| PDH_1187 | AYSG | 4 | 5908 |
| PDH_1188 | EYSG | 4 | 5909 |
| PDH_1189 | LYSA | 4 | 5910 |
| PDH_1190 | QYSG | 4 | 5911 |
| PDH_1191 | IYST | 4 | 5912 |
| PDH_1192 | EYST | 4 | 5913 |
| PDH_1193 | KYSS | 4 | 5914 |
| PDH_1194 | IYSS | 4 | 5915 |
| PDH_1195 | KYSA | 4 | 5916 |
| PDH_1196 | QWLS | 4 | 5917 |
| PDH_1197 | QWLL | 4 | 5918 |
| PDH_1198 | QWLP | 4 | 5919 |
| PDH_1199 | QWLD | 4 | 5920 |
| PDH_1200 | QWLY | 4 | 5921 |
| PDH_1201 | QWLA | 4 | 5922 |
| PDH_1202 | QWLV | 4 | 4475 |
| PDH_1203 | QWLH | 4 | 5923 |
| PDH_1204 | QWLF | 4 | 5924 |
| PDH_1205 | PVAD | 4 | 5925 |
| PDH_1206 | PVAA | 4 | 5926 |
| PDH_1207 | IVAA | 4 | 5927 |
| PDH_1208 | EVAA | 4 | 5928 |
| PDH_1209 | EVAV | 4 | 5929 |
| PDH_1210 | VVAA | 4 | 3802 |
| PDH_1211 | IVAD | 4 | 5930 |
| PDH_1212 | EVAD | 4 | 5931 |
| PDH_1213 | IVAG | 4 | 5932 |
| PDH_1214 | QVAD | 4 | 5933 |
| PDH_1215 | AVAA | 4 | 5934 |
| PDH_1216 | AVAV | 4 | 5935 |
| PDH_1217 | AVAD | 4 | 5936 |
| PDH_1218 | KVAA | 4 | 5937 |
| PDH_1219 | QVAA | 4 | 5938 |
| PDH_1220 | TVAV | 4 | 5939 |
| PDH_1221 | LVAD | 4 | 5940 |
| PDH_1222 | LVAA | 4 | 5941 |
| PDH_1223 | IVAV | 4 | 5942 |
| PDH_1224 | VVAD | 4 | 5943 |
| PDH_1225 | VVAV | 4 | 5944 |
| PDH_1226 | QVAV | 4 | 5945 |
| PDH_1227 | PVAV | 4 | 5946 |
| PDH_1228 | KVAV | 4 | 5947 |
| PDH_1229 | LVAV | 4 | 5948 |
| PDH_1230 | TVAD | 4 | 5949 |
| PDH_1231 | KVAD | 4 | 5950 |
| PDH_1232 | TVAA | 4 | 5951 |
| PDH_1233 | STVA | 4 | 5952 |
| PDH_1234 | STVK | 4 | 5953 |
| PDH_1235 | RTVA | 4 | 5954 |
| PDH_1236 | ITVT | 4 | 5955 |
| PDH_1237 | PTVA | 4 | 5956 |
| PDH_1238 | ATVT | 4 | 5957 |
| PDH_1239 | ATVK | 4 | 5958 |
| PDH_1240 | VTVK | 4 | 5959 |
| PDH_1241 | TTVK | 4 | 5960 |
| PDH_1242 | PTVE | 4 | 5961 |
| PDH_1243 | VTVT | 4 | 5962 |
| PDH_1244 | STVT | 4 | 5963 |
| PDH_1245 | VTVE | 4 | 5964 |
| PDH_1246 | TTVT | 4 | 4352 |
| PDH_1247 | LTVA | 4 | 5965 |
| PDH_1248 | RTVT | 4 | 5966 |
| PDH_1249 | LTVE | 4 | 5967 |
| PDH_1250 | TTVE | 4 | 5968 |
| PDH_1251 | RTVK | 4 | 5969 |
| PDH_1252 | VTVA | 4 | 5970 |
| PDH_1253 | STVE | 4 | 5971 |
| PDH_1254 | ATVA | 4 | 5972 |
| PDH_1255 | GTVE | 4 | 5973 |
| PDH_1256 | GTVA | 4 | 5974 |
| PDH_1257 | ITVE | 4 | 5975 |
| PDH_1258 | PTVT | 4 | 5976 |
| PDH_1259 | ITVA | 4 | 5977 |
| PDH_1260 | ATVE | 4 | 5978 |
| PDH_1261 | GTVK | 4 | 5979 |
| PDH_1262 | LTVK | 4 | 5980 |
| PDH_1263 | ITVK | 4 | 5981 |
| PDH_1264 | RTVE | 4 | 5982 |
| PDH_1265 | LTVT | 4 | 5983 |
| PDH_1266 | TTVA | 4 | 5984 |
| PDH_1267 | PTVK | 4 | 5985 |
| PDH_1268 | GTVT | 4 | 5986 |
| PDH_1269 | SSSA | 4 | 5987 |
| PDH_1270 | SSSS | 4 | 4480 |
| PDH_1271 | SSSL | 4 | 5988 |
| PDH_1272 | SSSW | 4 | 4443 |
| PDH_1273 | SSSR | 4 | 5989 |
| PDH_1274 | SSSV | 4 | 5990 |
| PDH_1275 | SSST | 4 | 5991 |
| PDH_1276 | SSSM | 4 | 5992 |
| PDH_1277 | SSSG | 4 | 5993 |
| PDH_1278 | LSYG | 4 | 5994 |
| PDH_1279 | PYYG | 4 | 5995 |
| PDH_1280 | ASYG | 4 | 5996 |
| PDH_1281 | FYYG | 4 | 5997 |
| PDH_1282 | DSYG | 4 | 5998 |
| PDH_1283 | VYYG | 4 | 5999 |
| PDH_1284 | IYYG | 4 | 6000 |
| PDH_1285 | DYYG | 4 | 6001 |
| PDH_1286 | HYYG | 4 | 6002 |
| PDH_1287 | SYYG | 4 | 6003 |
| PDH_1288 | YYYG | 4 | 3989 |
| PDH_1289 | VSYG | 4 | 6004 |
| PDH_1290 | NSYG | 4 | 6005 |
| PDH_1291 | SSYG | 4 | 6006 |
| PDH_1292 | FSYG | 4 | 6007 |
| PDH_1293 | ISYG | 4 | 6008 |
| PDH_1294 | TSYG | 4 | 6009 |
| PDH_1295 | LYYG | 4 | 6010 |
| PDH_1296 | PSYG | 4 | 6011 |
| PDH_1297 | AYYG | 4 | 6012 |
| PDH_1298 | YSYG | 4 | 4433 |
| PDH_1299 | HSYG | 4 | 6013 |
| PDH_1300 | NYYG | 4 | 6014 |
| PDH_1301 | TYYG | 4 | 6015 |
| PDH_1302 | FSWY | 4 | 6016 |
| PDH_1303 | SSWF | 4 | 6017 |
| PDH_1304 | DSWS | 4 | 6018 |
| PDH_1305 | LSWS | 4 | 6019 |
| PDH_1306 | DSWY | 4 | 6020 |
| PDH_1307 | LSWF | 4 | 6021 |
| PDH_1308 | LSWY | 4 | 6022 |
| PDH_1309 | VSWS | 4 | 6023 |
| PDH_1310 | HSWY | 4 | 6024 |
| PDH_1311 | SSWS | 4 | 6025 |
| PDH_1312 | PSWS | 4 | 6026 |
| PDH_1313 | SSWY | 4 | 4444 |
| PDH_1314 | FSWF | 4 | 6027 |
| PDH_1315 | FSWS | 4 | 6028 |
| PDH_1316 | PSWF | 4 | 6029 |
| PDH_1317 | VSWF | 4 | 6030 |
| PDH_1318 | HSWF | 4 | 6031 |
| PDH_1319 | VSWY | 4 | 6032 |
| PDH_1320 | HSWS | 4 | 6033 |
| PDH_1321 | DSWF | 4 | 6034 |
| PDH_1322 | PSWY | 4 | 6035 |
| PDH_1323 | ASWY | 4 | 6036 |
| PDH_1324 | YSWS | 4 | 6037 |
| PDH_1325 | ASWF | 4 | 6038 |
| PDH_1326 | ASWS | 4 | 6039 |
| PDH_1327 | YSWF | 4 | 6040 |
| PDH_1328 | YSWY | 4 | 6041 |
| PDH_1329 | IQLV | 4 | 6042 |
| PDH_1330 | AQLG | 4 | 6043 |
| PDH_1331 | IQLA | 4 | 6044 |
| PDH_1332 | EQLV | 4 | 6045 |
| PDH_1333 | AQLA | 4 | 6046 |
| PDH_1334 | IQLG | 4 | 6047 |
| PDH_1335 | KQLD | 4 | 6048 |
| PDH_1336 | TQLV | 4 | 6049 |
| PDH_1337 | QQLA | 4 | 6050 |
| PDH_1338 | AQLD | 4 | 6051 |
| PDH_1339 | IQLD | 4 | 6052 |
| PDH_1340 | AQLV | 4 | 6053 |
| PDH_1341 | KQLA | 4 | 6054 |
| PDH_1342 | KQLG | 4 | 6055 |
| PDH_1343 | LQLD | 4 | 6056 |
| PDH_1344 | LQLG | 4 | 6057 |
| PDH_1345 | TQLA | 4 | 6058 |
| PDH_1346 | VQLD | 4 | 6059 |
| PDH_1347 | TQLD | 4 | 6060 |
| PDH_1348 | VQLA | 4 | 6061 |
| PDH_1349 | EQLD | 4 | 6062 |
| PDH_1350 | VQLG | 4 | 6063 |
| PDH_1351 | TQLG | 4 | 6064 |
| PDH_1352 | PQLD | 4 | 6065 |
| PDH_1353 | QQLV | 4 | 4455 |
| PDH_1354 | QQLD | 4 | 6066 |
| PDH_1355 | PQLA | 4 | 6067 |
| PDH_1356 | PQLG | 4 | 6068 |
| PDH_1357 | VQLV | 4 | 6069 |
| PDH_1358 | QQLG | 4 | 6070 |
| PDH_1359 | KQLV | 4 | 6071 |
| PDH_1360 | LQLV | 4 | 6072 |
| PDH_1361 | LQLA | 4 | 6073 |
| PDH_1362 | EQLA | 4 | 6074 |
| PDH_1363 | PQLV | 4 | 6075 |
| PDH_1364 | EQLG | 4 | 6076 |
| PDH_1365 | DGSA | 4 | 6077 |
| PDH_1366 | DGSS | 4 | 6078 |
| PDH_1367 | SGSA | 4 | 6079 |
| PDH_1368 | DGSD | 4 | 6080 |
| PDH_1369 | SGSD | 4 | 6081 |
| PDH_1370 | PGSD | 4 | 6082 |
| PDH_1371 | FGSS | 4 | 6083 |
| PDH_1372 | HGSA | 4 | 6084 |
| PDH_1373 | YGSS | 4 | 6085 |
| PDH_1374 | FGSA | 4 | 6086 |
| PDH_1375 | FGSD | 4 | 6087 |
| PDH_1376 | LGSA | 4 | 6088 |
| PDH_1377 | LGSS | 4 | 6089 |
| PDH_1378 | AGSD | 4 | 6090 |
| PDH_1379 | VGSS | 4 | 6091 |
| PDH_1380 | AGSS | 4 | 6092 |
| PDH_1381 | HGSD | 4 | 6093 |
| PDH_1382 | VGSA | 4 | 6094 |
| PDH_1383 | YGSA | 4 | 6095 |
| PDH_1384 | YGSD | 4 | 6096 |
| PDH_1385 | AGSA | 4 | 6097 |
| PDH_1386 | HGSS | 4 | 6098 |
| PDH_1387 | VGSD | 4 | 6099 |
| PDH_1388 | PGSA | 4 | 6100 |
| PDH_1389 | PGSS | 4 | 6101 |
| PDH_1390 | SGSS | 4 | 6102 |
| PDH_1391 | LGSD | 4 | 6103 |
| PDH_1392 | SGWY | 4 | 4464 |
| PDH_1393 | PGWY | 4 | 6104 |
| PDH_1394 | FGWY | 4 | 6105 |
| PDH_1395 | YGWY | 4 | 6106 |
| PDH_1396 | AGWY | 4 | 6107 |
| PDH_1397 | VGWY | 4 | 6108 |
| PDH_1398 | LGWY | 4 | 6109 |
| PDH_1399 | DGWY | 4 | 6110 |
| PDH_1400 | HGWY | 4 | 6111 |
| PDH_1401 | PSGW | 4 | 6112 |
| PDH_1402 | YSGW | 4 | 6113 |
| PDH_1403 | FSGR | 4 | 6114 |
| PDH_1404 | VSGG | 4 | 6115 |
| PDH_1405 | NSGR | 4 | 6116 |
| PDH_1406 | DSGR | 4 | 6117 |
| PDH_1407 | ASGR | 4 | 6118 |
| PDH_1408 | FSGW | 4 | 6119 |
| PDH_1409 | DSGW | 4 | 6120 |
| PDH_1410 | VSGR | 4 | 6121 |
| PDH_1411 | ISGW | 4 | 6122 |
| PDH_1412 | LSGW | 4 | 6123 |
| PDH_1413 | DSGG | 4 | 3723 |
| PDH_1414 | HSGR | 4 | 6124 |
| PDH_1415 | NSGW | 4 | 6125 |
| PDH_1416 | HSGG | 4 | 6126 |
| PDH_1417 | HSGW | 4 | 6127 |
| PDH_1418 | ISGG | 4 | 6128 |
| PDH_1419 | YSGR | 4 | 6129 |
| PDH_1420 | ISGR | 4 | 6130 |
| PDH_1421 | YSGG | 4 | 6131 |
| PDH_1422 | NSGG | 4 | 6132 |
| PDH_1423 | SSGW | 4 | 4463 |
| PDH_1424 | VSGW | 4 | 6133 |
| PDH_1425 | SSGR | 4 | 6134 |
| PDH_1426 | LSGR | 4 | 6135 |
| PDH_1427 | PSGR | 4 | 6136 |
| PDH_1428 | FSGG | 4 | 6137 |
| PDH_1429 | TSGR | 4 | 6138 |
| PDH_1430 | TSGW | 4 | 6139 |
| PDH_1431 | ASGG | 4 | 6140 |
| PDH_1432 | LSGG | 4 | 6141 |
| PDH_1433 | ASGW | 4 | 6142 |
| PDH_1434 | PSGG | 4 | 6143 |
| PDH_1435 | TSGG | 4 | 6144 |
| PDH_1436 | SSGG | 4 | 6145 |
| PDH_1437 | VGYD | 4 | 6146 |
| PDH_1438 | AGYD | 4 | 6147 |
| PDH_1439 | DGYD | 4 | 6148 |
| PDH_1440 | AGYA | 4 | 6149 |
| PDH_1441 | DGYA | 4 | 6150 |
| PDH_1442 | FGYA | 4 | 6151 |
| PDH_1443 | FGYD | 4 | 6152 |
| PDH_1444 | PGYA | 4 | 6153 |
| PDH_1445 | DGYS | 4 | 6154 |
| PDH_1446 | YGYA | 4 | 6155 |
| PDH_1447 | FGYS | 4 | 6156 |
| PDH_1448 | VGYA | 4 | 6157 |
| PDH_1449 | PGYD | 4 | 6158 |
| PDH_1450 | PGYS | 4 | 6159 |
| PDH_1451 | VGYS | 4 | 6160 |
| PDH_1452 | YGYD | 4 | 6161 |
| PDH_1453 | HGYA | 4 | 6162 |
| PDH_1454 | YGYS | 4 | 6163 |
| PDH_1455 | HGYD | 4 | 6164 |
| PDH_1456 | SGYS | 4 | 6165 |
| PDH_1457 | LGYA | 4 | 6166 |
| PDH_1458 | HGYS | 4 | 6167 |
| PDH_1459 | LGYD | 4 | 6168 |
| PDH_1460 | AGYS | 4 | 6169 |
| PDH_1461 | LGYS | 4 | 6170 |
| PDH_1462 | SGYD | 4 | 4393 |
| PDH_1463 | SGYA | 4 | 6171 |
| PDH_1464 | QVTA | 4 | 6172 |
| PDH_1465 | PVTA | 4 | 6173 |
| PDH_1466 | LVTT | 4 | 6174 |
| PDH_1467 | PVTT | 4 | 6175 |
| PDH_1468 | PVTE | 4 | 6176 |
| PDH_1469 | QVTT | 4 | 6177 |
| PDH_1470 | AVTA | 4 | 6178 |
| PDH_1471 | QVTK | 4 | 6179 |
| PDH_1472 | IVTA | 4 | 6180 |
| PDH_1473 | PVTK | 4 | 6181 |
| PDH_1474 | LVTK | 4 | 6182 |
| PDH_1475 | AVTE | 4 | 6183 |
| PDH_1476 | LVTA | 4 | 6184 |
| PDH_1477 | EVTA | 4 | 6185 |
| PDH_1478 | LVTE | 4 | 6186 |
| PDH_1479 | EVTE | 4 | 6187 |
| PDH_1480 | IVTE | 4 | 6188 |
| PDH_1481 | VVTA | 4 | 3906 |
| PDH_1482 | TVTK | 4 | 6189 |
| PDH_1483 | TVTT | 4 | 4353 |
| PDH_1484 | IVTT | 4 | 6190 |
| PDH_1485 | VVTE | 4 | 6191 |
| PDH_1486 | IVTK | 4 | 6192 |
| PDH_1487 | TVTE | 4 | 6193 |
| PDH_1488 | AVTT | 4 | 6194 |
| PDH_1489 | KVTA | 4 | 6195 |
| PDH_1490 | KVTE | 4 | 6196 |
| PDH_1491 | AVTK | 4 | 6197 |
| PDH_1492 | EVTK | 4 | 6198 |
| PDH_1493 | KVTK | 4 | 6199 |
| PDH_1494 | VVTK | 4 | 6200 |
| PDH_1495 | TVTA | 4 | 6201 |
| PDH_1496 | QVTE | 4 | 6202 |
| PDH_1497 | VVTT | 4 | 6203 |
| PDH_1498 | EVTT | 4 | 6204 |
| PDH_1499 | KVTT | 4 | 6205 |
| PDH_1500 | AAAG | 4 | 4453 |
| PDH_1501 | AAAS | 4 | 6206 |
| PDH_1502 | AAAL | 4 | 6207 |
| PDH_1503 | AAAR | 4 | 6208 |
| PDH_1504 | AAAI | 4 | 6209 |
| PDH_1505 | AAAV | 4 | 6210 |
| PDH_1506 | AAAP | 4 | 6211 |
| PDH_1507 | AAAA | 4 | 6212 |
| PDH_1508 | AIFG | 4 | 6213 |
| PDH_1509 | ATFG | 4 | 6214 |
| PDH_1510 | PTFG | 4 | 6215 |
| PDH_1511 | TTFG | 4 | 6216 |
| PDH_1512 | ITFG | 4 | 4153 |
| PDH_1513 | RTFG | 4 | 6217 |
| PDH_1514 | STFG | 4 | 6218 |
| PDH_1515 | SIFG | 4 | 6219 |
| PDH_1516 | LIFG | 4 | 6220 |
| PDH_1517 | RIFG | 4 | 6221 |
| PDH_1518 | TIFG | 4 | 4291 |
| PDH_1519 | GIFG | 4 | 6222 |
| PDH_1520 | IIFG | 4 | 6223 |
| PDH_1521 | LTFG | 4 | 6224 |
| PDH_1522 | VIFG | 4 | 6225 |
| PDH_1523 | PIFG | 4 | 6226 |
| PDH_1524 | GTFG | 4 | 6227 |
| PDH_1525 | VTFG | 4 | 6228 |
| PDH_1526 | VAAK | 4 | 6229 |
| PDH_1527 | VAAL | 4 | 6230 |
| PDH_1528 | VAAP | 4 | 6231 |
| PDH_1529 | VAAQ | 4 | 6232 |
| PDH_1530 | VAAA | 4 | 6233 |
| PDH_1531 | VAAE | 4 | 6234 |
| PDH_1532 | VAAV | 4 | 6235 |
| PDH_1533 | VAAI | 4 | 6236 |
| PDH_1534 | YYYD | 4 | 4182 |
| PDH_1535 | VYYA | 4 | 6237 |
| PDH_1536 | AYYD | 4 | 6238 |
| PDH_1537 | YYYA | 4 | 6239 |
| PDH_1538 | PYYD | 4 | 6240 |
| PDH_1539 | IYYD | 4 | 6241 |
| PDH_1540 | VYYD | 4 | 6242 |
| PDH_1541 | IYYA | 4 | 6243 |
| PDH_1542 | TYYA | 4 | 6244 |
| PDH_1543 | LYYD | 4 | 6245 |
| PDH_1544 | DYYD | 4 | 6246 |
| PDH_1545 | SYYD | 4 | 6247 |
| PDH_1546 | LYYA | 4 | 6248 |
| PDH_1547 | HYYA | 4 | 6249 |
| PDH_1548 | DYYA | 4 | 6250 |
| PDH_1549 | SYYA | 4 | 6251 |
| PDH_1550 | FYYD | 4 | 6252 |
| PDH_1551 | FYYA | 4 | 6253 |
| PDH_1552 | PYYA | 4 | 6254 |
| PDH_1553 | AYYA | 4 | 6255 |
| PDH_1554 | HYYD | 4 | 6256 |
| PDH_1555 | NYYA | 4 | 6257 |
| PDH_1556 | TYYD | 4 | 6258 |
| PDH_1557 | NYYD | 4 | 6259 |
| PDH_1558 | GYGY | 4 | 6260 |
| PDH_1559 | LYGY | 4 | 6261 |
| PDH_1560 | SSGY | 4 | 4186 |
| PDH_1561 | RYGY | 4 | 6262 |
| PDH_1562 | TYGY | 4 | 6263 |
| PDH_1563 | TSGY | 4 | 6264 |
| PDH_1564 | VYGY | 4 | 6265 |
| PDH_1565 | ISGY | 4 | 6266 |
| PDH_1566 | ASGY | 4 | 6267 |
| PDH_1567 | PSGY | 4 | 6268 |
| PDH_1568 | RSGY | 4 | 6269 |
| PDH_1569 | GAGY | 4 | 6270 |
| PDH_1570 | AAGY | 4 | 6271 |
| PDH_1571 | LSGY | 4 | 6272 |
| PDH_1572 | SYGY | 4 | 4434 |
| PDH_1573 | VSGY | 4 | 6273 |
| PDH_1574 | VAGY | 4 | 6274 |
| PDH_1575 | TAGY | 4 | 6275 |
| PDH_1576 | PAGY | 4 | 6276 |
| PDH_1577 | SAGY | 4 | 6277 |
| PDH_1578 | RAGY | 4 | 6278 |
| PDH_1579 | IAGY | 4 | 6279 |
| PDH_1580 | AYGY | 4 | 6280 |
| PDH_1581 | PYGY | 4 | 6281 |
| PDH_1582 | LAGY | 4 | 6282 |
| PDH_1583 | IYGY | 4 | 6283 |
| PDH_1584 | GSGY | 4 | 6284 |
| PDH_1585 | LQLL | 4 | 6285 |
| PDH_1586 | AQLW | 4 | 6286 |
| PDH_1587 | TQLW | 4 | 6287 |
| PDH_1588 | QQLL | 4 | 6288 |
| PDH_1589 | IQLW | 4 | 4427 |
| PDH_1590 | EQLL | 4 | 6289 |
| PDH_1591 | QQLW | 4 | 6290 |
| PDH_1592 | IQLL | 4 | 6291 |
| PDH_1593 | EQLW | 4 | 6292 |
| PDH_1594 | VQLW | 4 | 6293 |
| PDH_1595 | KQLW | 4 | 6294 |
| PDH_1596 | KQLL | 4 | 6295 |
| PDH_1597 | PQLW | 4 | 6296 |
| PDH_1598 | VQLL | 4 | 6297 |
| PDH_1599 | TQLL | 4 | 6298 |
| PDH_1600 | PQLL | 4 | 6299 |
| PDH_1601 | LQLW | 4 | 6300 |
| PDH_1602 | AQLL | 4 | 6301 |
| PDH_1603 | LGVA | 4 | 6302 |
| PDH_1604 | LGGA | 4 | 6303 |
| PDH_1605 | KGIA | 4 | 6304 |
| PDH_1606 | KGSA | 4 | 6305 |
| PDH_1607 | VGIA | 4 | 6306 |
| PDH_1608 | KGGA | 4 | 6307 |
| PDH_1609 | MGGA | 4 | 6308 |
| PDH_1610 | TGGA | 4 | 6309 |
| PDH_1611 | QGSA | 4 | 6310 |
| PDH_1612 | QGIA | 4 | 6311 |
| PDH_1613 | EGSA | 4 | 6312 |
| PDH_1614 | PGVA | 4 | 6313 |
| PDH_1615 | QGVA | 4 | 6314 |
| PDH_1616 | EGIA | 4 | 6315 |
| PDH_1617 | AGVA | 4 | 6316 |
| PDH_1618 | MGVA | 4 | 6317 |
| PDH_1619 | EGGA | 4 | 3671 |
| PDH_1620 | PGIA | 4 | 6318 |
| PDH_1621 | AGGA | 4 | 6319 |
| PDH_1622 | VGGA | 4 | 6320 |
| PDH_1623 | EGVA | 4 | 6321 |
| PDH_1624 | PGGA | 4 | 6322 |
| PDH_1625 | QGGA | 4 | 6323 |
| PDH_1626 | AGIA | 4 | 6324 |
| PDH_1627 | LGIA | 4 | 6325 |
| PDH_1628 | MGIA | 4 | 6326 |
| PDH_1629 | TGSA | 4 | 6327 |
| PDH_1630 | TGIA | 4 | 6328 |
| PDH_1631 | MGSA | 4 | 6329 |
| PDH_1632 | KGVA | 4 | 6330 |
| PDH_1633 | TGVA | 4 | 6331 |
| PDH_1634 | VGVA | 4 | 6332 |
| PDH_1635 | PFGE | 4 | 6333 |
| PDH_1636 | VVGE | 4 | 6334 |
| PDH_1637 | ALGE | 4 | 6335 |
| PDH_1638 | IFGE | 4 | 6336 |
| PDH_1639 | PLGE | 4 | 6337 |
| PDH_1640 | ILGE | 4 | 6338 |
| PDH_1641 | PVGE | 4 | 6339 |
| PDH_1642 | RVGE | 4 | 6340 |
| PDH_1643 | LLGE | 4 | 6341 |
| PDH_1644 | SVGE | 4 | 6342 |
| PDH_1645 | GLGE | 4 | 6343 |
| PDH_1646 | IVGE | 4 | 6344 |
| PDH_1647 | RLGE | 4 | 4068 |
| PDH_1648 | LVGE | 4 | 6345 |
| PDH_1649 | SLGE | 4 | 6346 |
| PDH_1650 | TLGE | 4 | 6347 |
| PDH_1651 | VLGE | 4 | 6348 |
| PDH_1652 | TVGE | 4 | 6349 |
| PDH_1653 | GVGE | 4 | 6350 |
| PDH_1654 | AVGE | 4 | 6351 |
| PDH_1655 | PYSY | 4 | 6352 |
| PDH_1656 | PYSD | 4 | 6353 |
| PDH_1657 | DYSD | 4 | 6354 |
| PDH_1658 | DYSA | 4 | 6355 |
| PDH_1659 | SYSD | 4 | 6356 |
| PDH_1660 | FYSY | 4 | 6357 |
| PDH_1661 | VYSY | 4 | 6358 |
| PDH_1662 | FYSS | 4 | 6359 |
| PDH_1663 | SYSS | 4 | 6360 |
| PDH_1664 | YYSS | 4 | 6361 |
| PDH_1665 | YYSY | 4 | 6362 |
| PDH_1666 | AYSY | 4 | 6363 |
| PDH_1667 | AYSD | 4 | 6364 |
| PDH_1668 | HYSY | 4 | 6365 |
| PDH_1669 | VYSD | 4 | 6366 |
| PDH_1670 | FYSA | 4 | 6367 |
| PDH_1671 | SYSY | 4 | 6368 |
| PDH_1672 | SYSA | 4 | 6369 |
| PDH_1673 | FYSD | 4 | 6370 |
| PDH_1674 | YYSD | 4 | 6371 |
| PDH_1675 | LYSY | 4 | 6372 |
| PDH_1676 | YYSA | 4 | 6373 |
| PDH_1677 | HYSS | 4 | 6374 |
| PDH_1678 | DYSS | 4 | 6375 |
| PDH_1679 | HYSA | 4 | 6376 |
| PDH_1680 | DYSY | 4 | 6377 |
| PDH_1681 | HYSD | 4 | 6378 |
| PDH_1682 | LYSD | 4 | 6379 |
| PDH_1683 | AVPA | 4 | 6380 |
| PDH_1684 | AVRA | 4 | 6381 |
| PDH_1685 | PVRA | 4 | 6382 |
| PDH_1686 | PVPA | 4 | 6383 |
| PDH_1687 | IVGA | 4 | 3755 |
| PDH_1688 | EVPA | 4 | 6384 |
| PDH_1689 | LVGA | 4 | 6385 |
| PDH_1690 | IVRA | 4 | 6386 |
| PDH_1691 | QVGA | 4 | 6387 |
| PDH_1692 | IVPA | 4 | 6388 |
| PDH_1693 | EVGA | 4 | 6389 |
| PDH_1694 | LVPA | 4 | 6390 |
| PDH_1695 | QVPA | 4 | 6391 |
| PDH_1696 | AVGA | 4 | 6392 |
| PDH_1697 | QVRA | 4 | 6393 |
| PDH_1698 | TVRA | 4 | 6394 |
| PDH_1699 | KVGA | 4 | 6395 |
| PDH_1700 | VVPA | 4 | 3837 |
| PDH_1701 | VVGA | 4 | 6396 |
| PDH_1702 | EVRA | 4 | 6397 |
| PDH_1703 | LVRA | 4 | 6398 |
| PDH_1704 | VVRA | 4 | 6399 |
| PDH_1705 | PVGA | 4 | 6400 |
| PDH_1706 | TVGA | 4 | 6401 |
| PDH_1707 | KVRA | 4 | 6402 |
| PDH_1708 | KVPA | 4 | 6403 |
| PDH_1709 | TVPA | 4 | 6404 |
| PDH_1710 | GRGV | 4 | 6405 |
| PDH_1711 | SRGV | 4 | 6406 |
| PDH_1712 | ILGV | 4 | 6407 |
| PDH_1713 | AQGV | 4 | 6408 |
| PDH_1714 | TQGV | 4 | 6409 |
| PDH_1715 | VQGV | 4 | 4062 |
| PDH_1716 | PQGV | 4 | 6410 |
| PDH_1717 | SQGV | 4 | 6411 |
| PDH_1718 | RRGV | 4 | 6412 |
| PDH_1719 | PLGV | 4 | 6413 |
| PDH_1720 | PRGV | 4 | 6414 |
| PDH_1721 | IRGV | 4 | 6415 |
| PDH_1722 | ALGV | 4 | 6416 |
| PDH_1723 | VRGV | 4 | 4018 |
| PDH_1724 | TRGV | 4 | 6417 |
| PDH_1725 | TLGV | 4 | 6418 |
| PDH_1726 | GQGV | 4 | 6419 |
| PDH_1727 | RQGV | 4 | 6420 |
| PDH_1728 | ARGV | 4 | 4812 |
| PDH_1729 | RLGV | 4 | 6421 |
| PDH_1730 | LRGV | 4 | 6422 |
| PDH_1731 | SLGV | 4 | 6423 |
| PDH_1732 | VLGV | 4 | 6424 |
| PDH_1733 | IQGV | 4 | 6425 |
| PDH_1734 | LLGV | 4 | 6426 |
| PDH_1735 | LQGV | 4 | 6427 |
| PDH_1736 | GLGV | 4 | 6428 |
| PDH_1737 | DSSW | 4 | 6429 |
| PDH_1738 | DSSR | 4 | 6430 |
| PDH_1739 | DSSV | 4 | 6431 |
| PDH_1740 | DSST | 4 | 6432 |
| PDH_1741 | DSSM | 4 | 6433 |
| PDH_1742 | DSSG | 4 | 4185 |
| PDH_1743 | DSSA | 4 | 6434 |
| PDH_1744 | DSSS | 4 | 6435 |
| PDH_1745 | DSSL | 4 | 6436 |
| PDH_1746 | TGYS | 4 | 6437 |
| PDH_1747 | SDYS | 4 | 6438 |
| PDH_1748 | LAYS | 4 | 6439 |
| PDH_1749 | VDYS | 4 | 6440 |
| PDH_1750 | LDYS | 4 | 6441 |
| PDH_1751 | PDYS | 4 | 6442 |
| PDH_1752 | SAYS | 4 | 6443 |
| PDH_1753 | TDYS | 4 | 6444 |
| PDH_1754 | LAYS | 4 | 6445 |
| PDH_1755 | GAYS | 4 | 6446 |
| PDH_1756 | GDYS | 4 | 6447 |
| PDH_1757 | VAYS | 4 | 6448 |
| PDH_1758 | RDYS | 4 | 6449 |
| PDH_1759 | IDYS | 4 | 6450 |
| PDH_1760 | RAYS | 4 | 6451 |
| PDH_1761 | PAYS | 4 | 6452 |
| PDH_1762 | ADYS | 4 | 6453 |
| PDH_1763 | TAYS | 4 | 6454 |
| PDH_1764 | IGYS | 4 | 6455 |
| PDH_1765 | GGYS | 4 | 6456 |
| PDH_1766 | RGYS | 4 | 6457 |
| PDH_1767 | AAYS | 4 | 6458 |
| PDH_1768 | LYGS | 4 | 6459 |
| PDH_1769 | TYGS | 4 | 6460 |
| PDH_1770 | DYGS | 4 | 6461 |
| PDH_1771 | SYGS | 4 | 6462 |
| PDH_1772 | FYGS | 4 | 6463 |
| PDH_1773 | YYGS | 4 | 3990 |
| PDH_1774 | NYGS | 4 | 6464 |
| PDH_1775 | HYGS | 4 | 6465 |
| PDH_1776 | VYGS | 4 | 6466 |
| PDH_1777 | AYGS | 4 | 6467 |
| PDH_1778 | PYGS | 4 | 6468 |
| PDH_1779 | IYGS | 4 | 6469 |
| PDH_1780 | YYYS | 4 | 6470 |
| PDH_1781 | SYYS | 4 | 6471 |
| PDH_1782 | YYYY | 4 | 6472 |
| PDH_1783 | PYYF | 4 | 6473 |
| PDH_1784 | FYYS | 4 | 6474 |
| PDH_1785 | NYYS | 4 | 6475 |
| PDH_1786 | NYYF | 4 | 6476 |
| PDH_1787 | FYYF | 4 | 6477 |
| PDH_1788 | FYYY | 4 | 6478 |
| PDH_1789 | AYYY | 4 | 6479 |
| PDH_1790 | SYYY | 4 | 6480 |
| PDH_1791 | DYYY | 4 | 6481 |
| PDH_1792 | AYYS | 4 | 6482 |
| PDH_1793 | IYYY | 4 | 6483 |
| PDH_1794 | LYYY | 4 | 6484 |
| PDH_1795 | DYYS | 4 | 6485 |
| PDH_1796 | AYYF | 4 | 6486 |
| PDH_1797 | PYYS | 4 | 6487 |
| PDH_1798 | IYYS | 4 | 6488 |
| PDH_1799 | YYYF | 4 | 6489 |
| PDH_1800 | HYYS | 4 | 6490 |
| PDH_1801 | PYYY | 4 | 6491 |
| PDH_1802 | HYYF | 4 | 6492 |
| PDH_1803 | HYYY | 4 | 6493 |
| PDH_1804 | LYYS | 4 | 6494 |
| PDH_1805 | VYYF | 4 | 6495 |
| PDH_1806 | SYYF | 4 | 6496 |
| PDH_1807 | IYYF | 4 | 6497 |
| PDH_1808 | LYYF | 4 | 6498 |
| PDH_1809 | DYYF | 4 | 6499 |
| PDH_1810 | TYYS | 4 | 6500 |
| PDH_1811 | NYYY | 4 | 6501 |
| PDH_1812 | TYYF | 4 | 6502 |
| PDH_1813 | TYYY | 4 | 6503 |
| PDH_1814 | VYYS | 4 | 6504 |
| PDH_1815 | VYYY | 4 | 6505 |
| PDH_1816 | FSYS | 4 | 6506 |
| PDH_1817 | VRYS | 4 | 6507 |
| PDH_1818 | YSYS | 4 | 6508 |
| PDH_1819 | LRYS | 4 | 6509 |
| PDH_1820 | ARYS | 4 | 6510 |
| PDH_1821 | FRYS | 4 | 6511 |
| PDH_1822 | SRYS | 4 | 6512 |
| PDH_1823 | DSYS | 4 | 6513 |
| PDH_1824 | LSYS | 4 | 6514 |
| PDH_1825 | HRYS | 4 | 6515 |
| PDH_1826 | PSYS | 4 | 6516 |
| PDH_1827 | HSYS | 4 | 6517 |
| PDH_1828 | ASYS | 4 | 6518 |
| PDH_1829 | YRYS | 4 | 6519 |
| PDH_1830 | SSYS | 4 | 6520 |
| PDH_1831 | PRYS | 4 | 6521 |
| PDH_1832 | VSYS | 4 | 6522 |
| PDH_1833 | DRYS | 4 | 6523 |
| PDH_1834 | TWFG | 4 | 6524 |
| PDH_1835 | GWFG | 4 | 6525 |
| PDH_1836 | RWFG | 4 | 6526 |
| PDH_1837 | PWFG | 4 | 6527 |
| PDH_1838 | LWFG | 4 | 3965 |
| PDH_1839 | VWFG | 4 | 6528 |
| PDH_1840 | SWFG | 4 | 6529 |
| PDH_1841 | AWFG | 4 | 6530 |
| PDH_1842 | IWFG | 4 | 6531 |
| PDH_1843 | RYYY | 4 | 6532 |
| PDH_1844 | RYYS | 4 | 6533 |
| PDH_1845 | RYYF | 4 | 6534 |
| PDH_1846 | GYYF | 4 | 6535 |
| PDH_1847 | GYYS | 4 | 6536 |
| PDH_1848 | GYYY | 4 | 4188 |
| PDH_1849 | KFGG | 4 | 6537 |
| PDH_1850 | ALGG | 4 | 6538 |
| PDH_1851 | ILGG | 4 | 6539 |
| PDH_1852 | EFGG | 4 | 6540 |
| PDH_1853 | QFGG | 4 | 6541 |
| PDH_1854 | PLGG | 4 | 6542 |
| PDH_1855 | VLGG | 4 | 6543 |
| PDH_1856 | IVGG | 4 | 6544 |
| PDH_1857 | LLGG | 4 | 6545 |
| PDH_1858 | QLGG | 4 | 6546 |
| PDH_1859 | KLGG | 4 | 6547 |
| PDH_1860 | IFGG | 4 | 6548 |
| PDH_1861 | ELGG | 4 | 3713 |
| PDH_1862 | PFGG | 4 | 6549 |
| PDH_1863 | TLGG | 4 | 6550 |
| PDH_1864 | YMVRD | 5 | 6551 |
| PDH_1865 | SMVRG | 5 | 6552 |
| PDH_1866 | FMVRD | 5 | 6553 |
| PDH_1867 | FMVRA | 5 | 6554 |
| PDH_1868 | DMVRA | 5 | 6555 |
| PDH_1869 | HMVRG | 5 | 6556 |
| PDH_1870 | LMVRG | 5 | 6557 |
| PDH_1871 | DMVRD | 5 | 6558 |
| PDH_1872 | LMVRA | 5 | 6559 |
| PDH_1873 | DMVRG | 5 | 6560 |
| PDH_1874 | AMVRA | 5 | 6561 |
| PDH_1875 | AMVRD | 5 | 6562 |
| PDH_1876 | NMVRA | 5 | 6563 |
| PDH_1877 | NMVRG | 5 | 6564 |
| PDH_1878 | FMVRG | 5 | 6565 |
| PDH_1879 | SMVRD | 5 | 6566 |
| PDH_1880 | YMVRA | 5 | 6567 |
| PDH_1881 | SMVRA | 5 | 6568 |
| PDH_1882 | PMVRD | 5 | 6569 |
| PDH_1883 | YMVRG | 5 | 6570 |
| PDH_1884 | TMVRG | 5 | 4010 |
| PDH_1885 | PMVRA | 5 | 6571 |
| PDH_1886 | PMVRG | 5 | 6572 |
| PDH_1887 | VMVRA | 5 | 6573 |
| PDH_1888 | NMVRD | 5 | 6574 |
| PDH_1889 | VMVRG | 5 | 6575 |
| PDH_1890 | TMVRD | 5 | 6576 |
| PDH_1891 | VMVRD | 5 | 6577 |
| PDH_1892 | TMVRA | 5 | 6578 |
| PDH_1893 | AMVRG | 5 | 6579 |
| PDH_1894 | LMVRD | 5 | 6580 |
| PDH_1895 | HMVRD | 5 | 6581 |
| PDH_1896 | HMVRA | 5 | 6582 |
| PDH_1897 | IMVRD | 5 | 6583 |
| PDH_1898 | IMVRA | 5 | 6584 |
| PDH_1899 | IMVRG | 5 | 6585 |
| PDH_1900 | AYGDF | 5 | 6586 |
| PDH_1901 | VYGDS | 5 | 6587 |
| PDH_1902 | DYGDY | 5 | 4348 |
| PDH_1903 | NYGDF | 5 | 6588 |
| PDH_1904 | DYGDS | 5 | 6589 |
| PDH_1905 | HYGDS | 5 | 6590 |
| PDH_1906 | HYGDY | 5 | 6591 |
| PDH_1907 | IYGDS | 5 | 6592 |
| PDH_1908 | LYGDS | 5 | 6593 |
| PDH_1909 | LYGDF | 5 | 6594 |
| PDH_1910 | AYGDY | 5 | 6595 |
| PDH_1911 | AYGDS | 5 | 6596 |
| PDH_1912 | SYGDS | 5 | 6597 |
| PDH_1913 | SYGDY | 5 | 6598 |
| PDH_1914 | NYGDS | 5 | 6599 |
| PDH_1915 | HYGDF | 5 | 6600 |
| PDH_1916 | FYGDS | 5 | 6601 |
| PDH_1917 | IYGDF | 5 | 6602 |
| PDH_1918 | FYGDY | 5 | 6603 |
| PDH_1919 | VYGDY | 5 | 6604 |
| PDH_1920 | NYGDY | 5 | 6605 |
| PDH_1921 | YYGDS | 5 | 6606 |
| PDH_1922 | YYGDF | 5 | 6607 |
| PDH_1923 | PYGDY | 5 | 6608 |
| PDH_1924 | SYGDF | 5 | 6609 |
| PDH_1925 | TYGDS | 5 | 6610 |
| PDH_1926 | TYGDY | 5 | 6611 |
| PDH_1927 | LYGDY | 5 | 6612 |
| PDH_1928 | DYGDF | 5 | 6613 |
| PDH_1929 | IYGDY | 5 | 6614 |
| PDH_1930 | VYGDF | 5 | 6615 |
| PDH_1931 | FYGDF | 5 | 6616 |
| PDH_1932 | TYGDF | 5 | 6617 |
| PDH_1933 | PYGDF | 5 | 6618 |
| PDH_1934 | PYGDS | 5 | 6619 |
| PDH_1935 | YYGDY | 5 | 6620 |
| PDH_1936 | TYSYD | 5 | 6621 |
| PDH_1937 | PYSYG | 5 | 6622 |
| PDH_1938 | RYSYD | 5 | 6623 |
| PDH_1939 | AYSYV | 5 | 6624 |
| PDH_1940 | PYSYA | 5 | 6625 |
| PDH_1941 | TYSYV | 5 | 6626 |
| PDH_1942 | PYSYD | 5 | 6627 |
| PDH_1943 | TYSYG | 5 | 6628 |
| PDH_1944 | AYSYD | 5 | 6629 |
| PDH_1945 | RYSYA | 5 | 6630 |
| PDH_1946 | PYSYV | 5 | 6631 |
| PDH_1947 | GYSYG | 5 | 4430 |
| PDH_1948 | GYSYA | 5 | 6632 |
| PDH_1949 | GYSYD | 5 | 6633 |
| PDH_1950 | GYSYV | 5 | 6634 |
| PDH_1951 | LYSYG | 5 | 6635 |
| PDH_1952 | SYSYV | 5 | 6636 |
| PDH_1953 | LYSYA | 5 | 6637 |
| PDH_1954 | LYSYD | 5 | 6638 |
| PDH_1955 | RYSYV | 5 | 6639 |
| PDH_1956 | IYSYD | 5 | 6640 |
| PDH_1957 | VYSYV | 5 | 6641 |
| PDH_1958 | IYSYG | 5 | 6642 |
| PDH_1959 | IYSYA | 5 | 6643 |
| PDH_1960 | IYSYV | 5 | 6644 |
| PDH_1961 | RYSYG | 5 | 6645 |
| PDH_1962 | VYSYA | 5 | 6646 |
| PDH_1963 | AYSYA | 5 | 6647 |
| PDH_1964 | SYSYA | 5 | 6648 |
| PDH_1965 | VYSYG | 5 | 6649 |
| PDH_1966 | AYSYG | 5 | 6650 |
| PDH_1967 | VYSYD | 5 | 6651 |
| PDH_1968 | TYSYA | 5 | 6652 |
| PDH_1969 | SYSYD | 5 | 6653 |
| PDH_1970 | SYSYG | 5 | 6654 |
| PDH_1971 | LYSYV | 5 | 6655 |
| PDH_1972 | GSGSS | 5 | 6656 |
| PDH_1973 | GSGSF | 5 | 6657 |
| PDH_1974 | ASGSS | 5 | 6658 |
| PDH_1975 | RSGSY | 5 | 6659 |
| PDH_1976 | NSGSY | 5 | 6660 |
| PDH_1977 | NSGSS | 5 | 6661 |
| PDH_1978 | TSGSS | 5 | 6662 |
| PDH_1979 | RSGSS | 5 | 6663 |
| PDH_1980 | SSGSY | 5 | 6664 |
| PDH_1981 | VSGSF | 5 | 6665 |
| PDH_1982 | HSGSY | 5 | 6666 |
| PDH_1983 | TSGSY | 5 | 6667 |
| PDH_1984 | SSGSF | 5 | 6668 |
| PDH_1985 | LSGSF | 5 | 6669 |
| PDH_1986 | NSGSF | 5 | 6670 |
| PDH_1987 | PSGSY | 5 | 6671 |
| PDH_1988 | TSGSF | 5 | 6672 |
| PDH_1989 | PSGSS | 5 | 6673 |
| PDH_1990 | PSGSF | 5 | 6674 |
| PDH_1991 | GSGSY | 5 | 3987 |
| PDH_1992 | ISGSS | 5 | 6675 |
| PDH_1993 | ISGSY | 5 | 6676 |
| PDH_1994 | ASGSY | 5 | 6677 |
| PDH_1995 | RSGSF | 5 | 6678 |
| PDH_1996 | DSGSS | 5 | 6679 |
| PDH_1997 | DSGSY | 5 | 6680 |
| PDH_1998 | LSGSS | 5 | 6681 |
| PDH_1999 | SSGSS | 5 | 6682 |
| PDH_2000 | HSGSF | 5 | 6683 |
| PDH_2001 | HSGSS | 5 | 6684 |
| PDH_2002 | LSGSY | 5 | 6685 |
| PDH_2003 | ASGSF | 5 | 6686 |
| PDH_2004 | VSGSY | 5 | 6687 |
| PDH_2005 | ISGSF | 5 | 6688 |
| PDH_2006 | VSGSS | 5 | 6689 |
| PDH_2007 | DSGSF | 5 | 6690 |
| PDH_2008 | IFLES | 5 | 6691 |
| PDH_2009 | IFLEL | 5 | 6692 |
| PDH_2010 | RFLES | 5 | 6693 |
| PDH_2011 | LFLEL | 5 | 6694 |
| PDH_2012 | TFLES | 5 | 6695 |
| PDH_2013 | GFLEW | 5 | 6696 |
| PDH_2014 | GFLES | 5 | 6697 |
| PDH_2015 | TFLEW | 5 | 6698 |
| PDH_2016 | TFLEL | 5 | 6699 |
| PDH_2017 | VFLEW | 5 | 6700 |
| PDH_2018 | SFLEL | 5 | 6701 |
| PDH_2019 | VFLES | 5 | 6702 |
| PDH_2020 | GFLEL | 5 | 6703 |
| PDH_2021 | VFLEL | 5 | 6704 |
| PDH_2022 | AFLEL | 5 | 6705 |
| PDH_2023 | PFLES | 5 | 6706 |
| PDH_2024 | SFLEW | 5 | 6707 |
| PDH_2025 | AFLES | 5 | 6708 |
| PDH_2026 | AFLEW | 5 | 6709 |
| PDH_2027 | LFLEW | 5 | 6710 |
| PDH_2028 | PFLEL | 5 | 6711 |
| PDH_2029 | RFLEW | 5 | 4231 |
| PDH_2030 | RFLEL | 5 | 6712 |
| PDH_2031 | LFLES | 5 | 6713 |
| PDH_2032 | PFLEW | 5 | 6714 |
| PDH_2033 | SFLES | 5 | 6715 |
| PDH_2034 | IFLEW | 5 | 6716 |
| PDH_2035 | PGSYS | 5 | 6717 |
| PDH_2036 | AGSYA | 5 | 6718 |
| PDH_2037 | HGSYS | 5 | 6719 |
| PDH_2038 | HGSYY | 5 | 6720 |
| PDH_2039 | PGSYY | 5 | 6721 |
| PDH_2040 | SGSYS | 5 | 6722 |
| PDH_2041 | SGSYD | 5 | 6723 |
| PDH_2042 | SGSYA | 5 | 6724 |
| PDH_2043 | LGSYS | 5 | 6725 |
| PDH_2044 | VGSYS | 5 | 6726 |
| PDH_2045 | DGSYY | 5 | 6727 |
| PDH_2046 | FGSYS | 5 | 6728 |
| PDH_2047 | FGSYY | 5 | 6729 |
| PDH_2048 | HGSYD | 5 | 6730 |
| PDH_2049 | LGSYA | 5 | 6731 |
| PDH_2050 | HGSYA | 5 | 6732 |
| PDH_2051 | LGSYD | 5 | 6733 |
| PDH_2052 | DGSYS | 5 | 6734 |
| PDH_2053 | VGSYD | 5 | 6735 |
| PDH_2054 | VGSYY | 5 | 6736 |
| PDH_2055 | AGSYY | 5 | 6737 |
| PDH_2056 | YGSYS | 5 | 6738 |
| PDH_2057 | AGSYS | 5 | 6739 |
| PDH_2058 | AGSYD | 5 | 6740 |
| PDH_2059 | VGSYA | 5 | 6741 |
| PDH_2060 | DGSYD | 5 | 6742 |
| PDH_2061 | FGSYD | 5 | 6743 |
| PDH_2062 | DGSYA | 5 | 6744 |
| PDH_2063 | YGSYA | 5 | 6745 |
| PDH_2064 | FGSYA | 5 | 6746 |
| PDH_2065 | YGSYD | 5 | 6747 |
| PDH_2066 | LGSYY | 5 | 6748 |
| PDH_2067 | SGSYY | 5 | 3761 |
| PDH_2068 | PGSYA | 5 | 6749 |
| PDH_2069 | PGSYD | 5 | 6750 |
| PDH_2070 | YGSYY | 5 | 6751 |
| PDH_2071 | FSGSF | 5 | 6752 |
| PDH_2072 | FSGSY | 5 | 6753 |
| PDH_2073 | YSGSF | 5 | 6754 |
| PDH_2074 | YSGSS | 5 | 6755 |
| PDH_2075 | FSGSS | 5 | 6756 |
| PDH_2076 | YSGSY | 5 | 3760 |
| PDH_2077 | ASSSW | 5 | 6757 |
| PDH_2078 | VSSSS | 5 | 6758 |
| PDH_2079 | YSSSS | 5 | 4478 |
| PDH_2080 | YSSSL | 5 | 6759 |
| PDH_2081 | VSSSW | 5 | 6760 |
| PDH_2082 | ASSSL | 5 | 6761 |
| PDH_2083 | HSSSL | 5 | 6762 |
| PDH_2084 | PSSSL | 5 | 6763 |
| PDH_2085 | ASSSS | 5 | 6764 |
| PDH_2086 | HSSSW | 5 | 6765 |
| PDH_2087 | VSSSL | 5 | 6766 |
| PDH_2088 | FSSSL | 5 | 6767 |
| PDH_2089 | HSSSS | 5 | 6768 |
| PDH_2090 | FSSSW | 5 | 6769 |
| PDH_2091 | SSSSS | 5 | 6770 |
| PDH_2092 | DSSSS | 5 | 6771 |
| PDH_2093 | SSSSL | 5 | 6772 |
| PDH_2094 | FSSSS | 5 | 6773 |
| PDH_2095 | LSSSW | 5 | 6774 |
| PDH_2096 | DSSSL | 5 | 6775 |
| PDH_2097 | LSSSS | 5 | 6776 |
| PDH_2098 | LSSSL | 5 | 6777 |
| PDH_2099 | SSSSW | 5 | 6778 |
| PDH_2100 | DSSSW | 5 | 6779 |
| PDH_2101 | PSSSW | 5 | 6780 |
| PDH_2102 | PSSSS | 5 | 6781 |
| PDH_2103 | YSSSW | 5 | 4439 |
| PDH_2104 | HSSGW | 5 | 6782 |
| PDH_2105 | FSSGL | 5 | 6783 |
| PDH_2106 | SSSGW | 5 | 6784 |
| PDH_2107 | SSSGS | 5 | 6785 |
| PDH_2108 | DSSGL | 5 | 6786 |
| PDH_2109 | HSSGS | 5 | 6787 |
| PDH_2110 | FSSGW | 5 | 6788 |
| PDH_2111 | ASSGW | 5 | 6789 |
| PDH_2112 | DSSGW | 5 | 6790 |
| PDH_2113 | DSSGS | 5 | 6791 |
| PDH_2114 | ASSGL | 5 | 6792 |
| PDH_2115 | LSSGL | 5 | 6793 |
| PDH_2116 | FSSGS | 5 | 6794 |
| PDH_2117 | ASSGS | 5 | 6795 |
| PDH_2118 | PSSGS | 5 | 6796 |
| PDH_2119 | LSSGW | 5 | 6797 |
| PDH_2120 | LSSGS | 5 | 6798 |
| PDH_2121 | YSSGL | 5 | 6799 |
| PDH_2122 | VSSGS | 5 | 6800 |
| PDH_2123 | PSSGW | 5 | 6801 |
| PDH_2124 | PSSGL | 5 | 6802 |
| PDH_2125 | VSSGL | 5 | 6803 |
| PDH_2126 | VSSGW | 5 | 6804 |
| PDH_2127 | YSSGW | 5 | 4460 |
| PDH_2128 | SSSGL | 5 | 6805 |
| PDH_2129 | HSSGL | 5 | 6806 |
| PDH_2130 | YSSGS | 5 | 6807 |
| PDH_2131 | VTVTT | 5 | 6808 |
| PDH_2132 | RTVTT | 5 | 6809 |
| PDH_2133 | LTVTK | 5 | 6810 |
| PDH_2134 | ATVTK | 5 | 6811 |
| PDH_2135 | GTVTT | 5 | 6812 |
| PDH_2136 | VTVTK | 5 | 6813 |
| PDH_2137 | LTVTR | 5 | 6814 |
| PDH_2138 | ATVTT | 5 | 6815 |
| PDH_2139 | RTVTR | 5 | 6816 |
| PDH_2140 | VTVTR | 5 | 6817 |
| PDH_2141 | TTVTK | 5 | 6818 |
| PDH_2142 | GTVTR | 5 | 6819 |
| PDH_2143 | TTVTI | 5 | 6820 |
| PDH_2144 | RTVTK | 5 | 6821 |
| PDH_2145 | LTVTT | 5 | 6822 |
| PDH_2146 | VTVTI | 5 | 6823 |
| PDH_2147 | GTVTK | 5 | 6824 |
| PDH_2148 | TTVTR | 5 | 6825 |
| PDH_2149 | GTVTI | 5 | 6826 |
| PDH_2150 | PTVTI | 5 | 6827 |
| PDH_2151 | TTVTT | 5 | 4351 |
| PDH_2152 | STVTT | 5 | 6828 |
| PDH_2153 | STVTI | 5 | 6829 |
| PDH_2154 | ITVTI | 5 | 6830 |
| PDH_2155 | STVTK | 5 | 6831 |
| PDH_2156 | STVTR | 5 | 6832 |
| PDH_2157 | ATVTI | 5 | 6833 |
| PDH_2158 | ITVTT | 5 | 6834 |
| PDH_2159 | ITVTR | 5 | 6835 |
| PDH_2160 | LTVTI | 5 | 6836 |
| PDH_2161 | PTVTR | 5 | 6837 |
| PDH_2162 | ATVTR | 5 | 6838 |
| PDH_2163 | PTVTK | 5 | 6839 |
| PDH_2164 | RTVTI | 5 | 6840 |
| PDH_2165 | ITVTK | 5 | 6841 |
| PDH_2166 | PTVTT | 5 | 6842 |
| PDH_2167 | ASSSF | 5 | 6843 |
| PDH_2168 | ASSSY | 5 | 6844 |
| PDH_2169 | PSSSF | 5 | 6845 |
| PDH_2170 | HSSSF | 5 | 6846 |
| PDH_2171 | VSSSY | 5 | 6847 |
| PDH_2172 | YSSSF | 5 | 6848 |
| PDH_2173 | FSSSF | 5 | 6849 |
| PDH_2174 | HSSSY | 5 | 6850 |
| PDH_2175 | VSSSF | 5 | 6851 |
| PDH_2176 | SSSSY | 5 | 6852 |
| PDH_2177 | SSSSF | 5 | 6853 |
| PDH_2178 | LSSSY | 5 | 6854 |
| PDH_2179 | DSSSY | 5 | 6855 |
| PDH_2180 | FSSSY | 5 | 6856 |
| PDH_2181 | PSSSY | 5 | 6857 |
| PDH_2182 | YSSSY | 5 | 6858 |
| PDH_2183 | DSSSF | 5 | 6859 |
| PDH_2184 | LSSSF | 5 | 6860 |
| PDH_2185 | FSGWF | 5 | 6861 |
| PDH_2186 | FSGWS | 5 | 6862 |
| PDH_2187 | ISGWY | 5 | 6863 |
| PDH_2188 | FSGWY | 5 | 6864 |
| PDH_2189 | ISGWS | 5 | 6865 |
| PDH_2190 | PSGWS | 5 | 6866 |
| PDH_2191 | DSGWF | 5 | 6867 |
| PDH_2192 | PSGWY | 5 | 6868 |
| PDH_2193 | PSGWF | 5 | 6869 |
| PDH_2194 | TSGWY | 5 | 6870 |
| PDH_2195 | ASGWF | 5 | 6871 |
| PDH_2196 | LSGWF | 5 | 6872 |
| PDH_2197 | ISGWF | 5 | 6873 |
| PDH_2198 | SSGWY | 5 | 4461 |
| PDH_2199 | SSGWS | 5 | 6874 |
| PDH_2200 | SSGWF | 5 | 6875 |
| PDH_2201 | NSGWS | 5 | 6876 |
| PDH_2202 | NSGWY | 5 | 6877 |
| PDH_2203 | NSGWF | 5 | 6878 |
| PDH_2204 | VSGWS | 5 | 6879 |
| PDH_2205 | VSGWY | 5 | 6880 |
| PDH_2206 | YSGWF | 5 | 6881 |
| PDH_2207 | LSGWS | 5 | 6882 |
| PDH_2208 | ASGWY | 5 | 6883 |
| PDH_2209 | LSGWY | 5 | 6884 |
| PDH_2210 | TSGWF | 5 | 6885 |
| PDH_2211 | TSGWS | 5 | 6886 |
| PDH_2212 | DSGWY | 5 | 6887 |
| PDH_2213 | DSGWS | 5 | 6888 |
| PDH_2214 | ASGWS | 5 | 6889 |
| PDH_2215 | HSGWF | 5 | 6890 |
| PDH_2216 | HSGWS | 5 | 6891 |
| PDH_2217 | YSGWS | 5 | 6892 |
| PDH_2218 | HSGWY | 5 | 6893 |
| PDH_2219 | YSGWY | 5 | 6894 |
| PDH_2220 | VSGWF | 5 | 6895 |
| PDH_2221 | ISGYD | 5 | 6896 |
| PDH_2222 | HSGYA | 5 | 6897 |
| PDH_2223 | ISGYA | 5 | 6898 |
| PDH_2224 | HSGYG | 5 | 6899 |
| PDH_2225 | TSGYD | 5 | 6900 |
| PDH_2226 | TSGYA | 5 | 6901 |
| PDH_2227 | DSGYA | 5 | 6902 |
| PDH_2228 | LSGYA | 5 | 6903 |
| PDH_2229 | FSGYA | 5 | 6904 |
| PDH_2230 | LSGYD | 5 | 6905 |
| PDH_2231 | FSGYG | 5 | 6906 |
| PDH_2232 | SSGYD | 5 | 6907 |
| PDH_2233 | SSGYA | 5 | 6908 |
| PDH_2234 | ISGYG | 5 | 6909 |
| PDH_2235 | HSGYD | 5 | 6910 |
| PDH_2236 | ASGYD | 5 | 6911 |
| PDH_2237 | YSGYA | 5 | 6912 |
| PDH_2238 | YSGYD | 5 | 4389 |
| PDH_2239 | VSGYA | 5 | 6913 |
| PDH_2240 | VSGYG | 5 | 6914 |
| PDH_2241 | SSGYG | 5 | 6915 |
| PDH_2242 | DSGYD | 5 | 6916 |
| PDH_2243 | DSGYG | 5 | 6917 |
| PDH_2244 | FSGYD | 5 | 6918 |
| PDH_2245 | LSGYG | 5 | 6919 |
| PDH_2246 | TSGYG | 5 | 6920 |
| PDH_2247 | NSGYA | 5 | 6921 |
| PDH_2248 | NSGYG | 5 | 6922 |
| PDH_2249 | NSGYD | 5 | 6923 |
| PDH_2250 | PSGYA | 5 | 6924 |
| PDH_2251 | PSGYG | 5 | 6925 |
| PDH_2252 | PSGYD | 5 | 6926 |
| PDH_2253 | ASGYG | 5 | 6927 |
| PDH_2254 | VSGYD | 5 | 6928 |
| PDH_2255 | ASGYA | 5 | 6929 |
| PDH_2256 | YSGYG | 5 | 6930 |
| PDH_2257 | FYYDS | 5 | 6931 |
| PDH_2258 | YYYDT | 5 | 6932 |
| PDH_2259 | DYYDS | 5 | 6933 |
| PDH_2260 | AYYDS | 5 | 6934 |
| PDH_2261 | AYYDT | 5 | 6935 |
| PDH_2262 | DYYDI | 5 | 6936 |
| PDH_2263 | VYYDI | 5 | 6937 |
| PDH_2264 | FYYDT | 5 | 6938 |
| PDH_2265 | LYYDI | 5 | 6939 |
| PDH_2266 | PYYDI | 5 | 6940 |
| PDH_2267 | HYYDI | 5 | 6941 |
| PDH_2268 | IYYDI | 5 | 6942 |
| PDH_2269 | LYYDS | 5 | 6943 |
| PDH_2270 | SYYDI | 5 | 6944 |
| PDH_2271 | NYYDT | 5 | 6945 |
| PDH_2272 | NYYDS | 5 | 6946 |
| PDH_2273 | SYYDT | 5 | 6947 |
| PDH_2274 | AYYDI | 5 | 6948 |
| PDH_2275 | SYYDS | 5 | 6949 |
| PDH_2276 | DYYDT | 5 | 6950 |
| PDH_2277 | VYYDT | 5 | 6951 |
| PDH_2278 | YYYDI | 5 | 6952 |
| PDH_2279 | VYYDS | 5 | 6953 |
| PDH_2280 | FYYDI | 5 | 6954 |
| PDH_2281 | YYYDS | 5 | 4176 |
| PDH_2282 | TYYDT | 5 | 6955 |
| PDH_2283 | NYYDI | 5 | 6956 |
| PDH_2284 | HYYDS | 5 | 6957 |
| PDH_2285 | LYYDT | 5 | 6958 |
| PDH_2286 | IYYDT | 5 | 6959 |
| PDH_2287 | IYYDS | 5 | 6960 |
| PDH_2288 | PYYDT | 5 | 6961 |
| PDH_2289 | PYYDS | 5 | 6962 |
| PDH_2290 | TYYDI | 5 | 6963 |
| PDH_2291 | HYYDT | 5 | 6964 |
| PDH_2292 | TYYDS | 5 | 6965 |
| PDH_2293 | DSSGY | 5 | 4179 |
| PDH_2294 | SSSGY | 5 | 6966 |
| PDH_2295 | DSSGF | 5 | 6967 |
| PDH_2296 | HSSGY | 5 | 6968 |
| PDH_2297 | SSSGF | 5 | 6969 |
| PDH_2298 | ASSGF | 5 | 6970 |
| PDH_2299 | ASSGY | 5 | 6971 |
| PDH_2300 | LSSGF | 5 | 6972 |
| PDH_2301 | FSSGY | 5 | 6973 |
| PDH_2302 | FSSGF | 5 | 6974 |
| PDH_2303 | YSSGF | 5 | 6975 |
| PDH_2304 | PSSGY | 5 | 6976 |
| PDH_2305 | VSSGY | 5 | 6977 |
| PDH_2306 | LSSGY | 5 | 6978 |
| PDH_2307 | HSSGF | 5 | 6979 |
| PDH_2308 | PSSGF | 5 | 6980 |
| PDH_2309 | VSSGF | 5 | 6981 |
| PDH_2310 | YSSGY | 5 | 6982 |
| PDH_2311 | QAARH | 5 | 6983 |
| PDH_2312 | QAARP | 5 | 6984 |
| PDH_2313 | TAARR | 5 | 6985 |
| PDH_2314 | QAARL | 5 | 6986 |
| PDH_2315 | KAARR | 5 | 6987 |
| PDH_2316 | KAARP | 5 | 6988 |
| PDH_2317 | KAARH | 5 | 6989 |
| PDH_2318 | TAARH | 5 | 6990 |
| PDH_2319 | TAARP | 5 | 6991 |
| PDH_2320 | EAARL | 5 | 6992 |
| PDH_2321 | EAARP | 5 | 6993 |
| PDH_2322 | AAARL | 5 | 6994 |
| PDH_2323 | LAARL | 5 | 6995 |
| PDH_2324 | IAARL | 5 | 6996 |
| PDH_2325 | IAARH | 5 | 6997 |
| PDH_2326 | LAARR | 5 | 6998 |
| PDH_2327 | LAARH | 5 | 6999 |
| PDH_2328 | EAARH | 5 | 7000 |
| PDH_2329 | IAARR | 5 | 7001 |
| PDH_2330 | QAARR | 5 | 7002 |
| PDH_2331 | IAARP | 5 | 4483 |
| PDH_2332 | EAARR | 5 | 7003 |
| PDH_2333 | KAARL | 5 | 7004 |
| PDH_2334 | PAARR | 5 | 7005 |
| PDH_2335 | PAARP | 5 | 7006 |
| PDH_2336 | PAARH | 5 | 7007 |
| PDH_2337 | PAARL | 5 | 7008 |
| PDH_2338 | VAARR | 5 | 7009 |
| PDH_2339 | AAARH | 5 | 7010 |
| PDH_2340 | VAARP | 5 | 7011 |
| PDH_2341 | VAARH | 5 | 7012 |
| PDH_2342 | AAARP | 5 | 7013 |
| PDH_2343 | AAARR | 5 | 7014 |
| PDH_2344 | TAARL | 5 | 7015 |
| PDH_2345 | LAARP | 5 | 7016 |
| PDH_2346 | VAARL | 5 | 7017 |
| PDH_2347 | EYYYG | 5 | 7018 |
| PDH_2348 | VYYYD | 5 | 7019 |
| PDH_2349 | EYYYA | 5 | 7020 |
| PDH_2350 | VYYYG | 5 | 7021 |
| PDH_2351 | EYYYD | 5 | 7022 |
| PDH_2352 | PYYYD | 5 | 7023 |
| PDH_2353 | PYYYG | 5 | 7024 |
| PDH_2354 | AYYYG | 5 | 7025 |
| PDH_2355 | TYYYA | 5 | 7026 |
| PDH_2356 | TYYYG | 5 | 7027 |
| PDH_2357 | TYYYD | 5 | 7028 |
| PDH_2358 | QYYYA | 5 | 7029 |
| PDH_2359 | QYYYG | 5 | 7030 |
| PDH_2360 | QYYYD | 5 | 7031 |
| PDH_2361 | VYYYA | 5 | 7032 |
| PDH_2362 | LYYYG | 5 | 7033 |
| PDH_2363 | LYYYD | 5 | 7034 |
| PDH_2364 | LYYYA | 5 | 7035 |
| PDH_2365 | AYYYD | 5 | 7036 |
| PDH_2366 | AYYYA | 5 | 7037 |
| PDH_2367 | PYYYA | 5 | 7038 |
| PDH_2368 | MYYYD | 5 | 7039 |
| PDH_2369 | KYYYD | 5 | 7040 |
| PDH_2370 | KYYYG | 5 | 7041 |
| PDH_2371 | MYYYA | 5 | 7042 |
| PDH_2372 | KYYYA | 5 | 7043 |
| PDH_2373 | MYYYG | 5 | 7044 |
| PDH_2374 | LTMVR | 5 | 7045 |
| PDH_2375 | RTMVQ | 5 | 7046 |
| PDH_2376 | VTMVQ | 5 | 7047 |
| PDH_2377 | TTMVR | 5 | 7048 |
| PDH_2378 | LTMVQ | 5 | 7049 |
| PDH_2379 | STMVQ | 5 | 7050 |
| PDH_2380 | ATMVQ | 5 | 7051 |
| PDH_2381 | PTMVR | 5 | 7052 |
| PDH_2382 | RTMVR | 5 | 7053 |
| PDH_2383 | ITMVQ | 5 | 4055 |
| PDH_2384 | GTMVR | 5 | 7054 |
| PDH_2385 | VTMVR | 5 | 7055 |
| PDH_2386 | PTMVQ | 5 | 7056 |
| PDH_2387 | ITMVR | 5 | 4009 |
| PDH_2388 | ATMVR | 5 | 7057 |
| PDH_2389 | STMVR | 5 | 7058 |
| PDH_2390 | TTMVQ | 5 | 7059 |
| PDH_2391 | GTMVQ | 5 | 7060 |
| PDH_2392 | HMVQG | 5 | 7061 |
| PDH_2393 | DMVQG | 5 | 7062 |
| PDH_2394 | LMVQG | 5 | 7063 |
| PDH_2395 | SMVQG | 5 | 7064 |
| PDH_2396 | FMVQG | 5 | 7065 |
| PDH_2397 | NMVQG | 5 | 7066 |
| PDH_2398 | VMVQG | 5 | 7067 |
| PDH_2399 | TMVQG | 5 | 4056 |
| PDH_2400 | PMVQG | 5 | 7068 |
| PDH_2401 | YMVQG | 5 | 7069 |
| PDH_2402 | AMVQG | 5 | 7070 |
| PDH_2403 | IMVQG | 5 | 7071 |
| PDH_2404 | PWGSY | 5 | 7072 |
| PDH_2405 | TWGSY | 5 | 7073 |
| PDH_2406 | SWGSY | 5 | 7074 |
| PDH_2407 | HWGSY | 5 | 7075 |
| PDH_2408 | LWGSY | 5 | 7076 |
| PDH_2409 | DWGSY | 5 | 7077 |
| PDH_2410 | FWGSY | 5 | 7078 |
| PDH_2411 | AWGSY | 5 | 7079 |
| PDH_2412 | YWGSY | 5 | 7080 |
| PDH_2413 | IWGSY | 5 | 7081 |
| PDH_2414 | NWGSY | 5 | 7082 |
| PDH_2415 | VWGSY | 5 | 4102 |
| PDH_2416 | FSSSWF | 6 | 7083 |
| PDH_2417 | HSSSWS | 6 | 7084 |
| PDH_2418 | VSSSWF | 6 | 7085 |
| PDH_2419 | HSSSWY | 6 | 7086 |
| PDH_2420 | VSSSWS | 6 | 7087 |
| PDH_2421 | LSSSWY | 6 | 7088 |
| PDH_2422 | VSSSWY | 6 | 7089 |
| PDH_2423 | HSSSWF | 6 | 7090 |
| PDH_2424 | ASSSWY | 6 | 7091 |
| PDH_2425 | DSSSWS | 6 | 7092 |
| PDH_2426 | PSSSWY | 6 | 7093 |
| PDH_2427 | ASSSWS | 6 | 7094 |
| PDH_2428 | DSSSWF | 6 | 7095 |
| PDH_2429 | DSSSWY | 6 | 7096 |
| PDH_2430 | YSSSWS | 6 | 7097 |
| PDH_2431 | YSSSWF | 6 | 7098 |
| PDH_2432 | ASSSWF | 6 | 7099 |
| PDH_2433 | LSSSWS | 6 | 7100 |
| PDH_2434 | SSSSWS | 6 | 7101 |
| PDH_2435 | YSSSWY | 6 | 4437 |
| PDH_2436 | PSSSWS | 6 | 7102 |
| PDH_2437 | SSSSWY | 6 | 7103 |
| PDH_2438 | LSSSWF | 6 | 7104 |
| PDH_2439 | PSSSWF | 6 | 7105 |
| PDH_2440 | FSSSWS | 6 | 7106 |
| PDH_2441 | SSSSWF | 6 | 7107 |
| PDH_2442 | FSSSWY | 6 | 7108 |
| PDH_2443 | AYYDST | 6 | 7109 |
| PDH_2444 | AYYDSI | 6 | 7110 |
| PDH_2445 | YYYDST | 6 | 7111 |
| PDH_2446 | PYYDST | 6 | 7112 |
| PDH_2447 | VYYDSS | 6 | 7113 |
| PDH_2448 | NYYDSI | 6 | 7114 |
| PDH_2449 | PYYDSS | 6 | 7115 |
| PDH_2450 | YYYDSS | 6 | 4171 |
| PDH_2451 | YYYDSI | 6 | 7116 |
| PDH_2452 | VYYDST | 6 | 7117 |
| PDH_2453 | VYYDSI | 6 | 7118 |
| PDH_2454 | NYYDST | 6 | 7119 |
| PDH_2455 | LYYDST | 6 | 7120 |
| PDH_2456 | NYYDSS | 6 | 7121 |
| PDH_2457 | SYYDSI | 6 | 7122 |
| PDH_2458 | LYYDSS | 6 | 7123 |
| PDH_2459 | SYYDST | 6 | 7124 |
| PDH_2460 | LYYDSI | 6 | 7125 |
| PDH_2461 | SYYDSS | 6 | 7126 |
| PDH_2462 | DYYDSI | 6 | 7127 |
| PDH_2463 | DYYDST | 6 | 7128 |
| PDH_2464 | DYYDSS | 6 | 7129 |
| PDH_2465 | FYYDSS | 6 | 7130 |
| PDH_2466 | TYYDSI | 6 | 7131 |
| PDH_2467 | FYYDST | 6 | 7132 |
| PDH_2468 | IYYDST | 6 | 7133 |
| PDH_2469 | FYYDSI | 6 | 7134 |
| PDH_2470 | IYYDSS | 6 | 7135 |
| PDH_2471 | TYYDSS | 6 | 7136 |
| PDH_2472 | TYYDST | 6 | 7137 |
| PDH_2473 | HYYDSS | 6 | 7138 |
| PDH_2474 | HYYDST | 6 | 7139 |
| PDH_2475 | IYYDSI | 6 | 7140 |
| PDH_2476 | HYYDSI | 6 | 7141 |
| PDH_2477 | PYYDSI | 6 | 7142 |
| PDH_2478 | AYYDSS | 6 | 7143 |
| PDH_2479 | LYSGYA | 6 | 7144 |
| PDH_2480 | GYSGYV | 6 | 7145 |
| PDH_2481 | SYSGYD | 6 | 7146 |
| PDH_2482 | LYSGYD | 6 | 7147 |
| PDH_2483 | IYSGYV | 6 | 7148 |
| PDH_2484 | SYSGYG | 6 | 7149 |
| PDH_2485 | IYSGYG | 6 | 7150 |
| PDH_2486 | SYSGYA | 6 | 7151 |
| PDH_2487 | PYSGYG | 6 | 7152 |
| PDH_2488 | VYSGYD | 6 | 7153 |
| PDH_2489 | PYSGYA | 6 | 7154 |
| PDH_2490 | VYSGYV | 6 | 7155 |
| PDH_2491 | GYSGYG | 6 | 7156 |
| PDH_2492 | VYSGYA | 6 | 7157 |
| PDH_2493 | PYSGYV | 6 | 7158 |
| PDH_2494 | GYSGYA | 6 | 7159 |
| PDH_2495 | IYSGYD | 6 | 7160 |
| PDH_2496 | PYSGYD | 6 | 7161 |
| PDH_2497 | RYSGYV | 6 | 7162 |
| PDH_2498 | RYSGYA | 6 | 7163 |
| PDH_2499 | RYSGYG | 6 | 7164 |
| PDH_2500 | GYSGYD | 6 | 4386 |
| PDH_2501 | IYSGYA | 6 | 7165 |
| PDH_2502 | AYSGYA | 6 | 7166 |
| PDH_2503 | RYSGYD | 6 | 7167 |
| PDH_2504 | AYSGYG | 6 | 7168 |
| PDH_2505 | AYSGYD | 6 | 7169 |
| PDH_2506 | AYSGYV | 6 | 7170 |
| PDH_2507 | VYSGYG | 6 | 7171 |
| PDH_2508 | TYSGYV | 6 | 7172 |
| PDH_2509 | TYSGYD | 6 | 7173 |
| PDH_2510 | TYSGYA | 6 | 7174 |
| PDH_2511 | TYSGYG | 6 | 7175 |
| PDH_2512 | SYSGYV | 6 | 7176 |
| PDH_2513 | LYSGYV | 6 | 7177 |
| PDH_2514 | LYSGYG | 6 | 7178 |
| PDH_2515 | SSSGWF | 6 | 7179 |
| PDH_2516 | PSSGWY | 6 | 7180 |
| PDH_2517 | FSSGWF | 6 | 7181 |
| PDH_2518 | PSSGWS | 6 | 7182 |
| PDH_2519 | FSSGWS | 6 | 7183 |
| PDH_2520 | ASSGWY | 6 | 7184 |
| PDH_2521 | FSSGWY | 6 | 7185 |
| PDH_2522 | ASSGWS | 6 | 7186 |
| PDH_2523 | SSSGWS | 6 | 7187 |
| PDH_2524 | YSSGWY | 6 | 4458 |
| PDH_2525 | SSSGWY | 6 | 7188 |
| PDH_2526 | HSSGWS | 6 | 7189 |
| PDH_2527 | DSSGWS | 6 | 7190 |
| PDH_2528 | YSSGWS | 6 | 7191 |
| PDH_2529 | LSSGWF | 6 | 7192 |
| PDH_2530 | HSSGWY | 6 | 7193 |
| PDH_2531 | DSSGWF | 6 | 7194 |
| PDH_2532 | DSSGWY | 6 | 7195 |
| PDH_2533 | LSSGWY | 6 | 7196 |
| PDH_2534 | HSSGWF | 6 | 7197 |
| PDH_2535 | VSSGWS | 6 | 7198 |
| PDH_2536 | LSSGWS | 6 | 7199 |
| PDH_2537 | VSSGWY | 6 | 7200 |
| PDH_2538 | VSSGWF | 6 | 7201 |
| PDH_2539 | PSSGWF | 6 | 7202 |
| PDH_2540 | ASSGWF | 6 | 7203 |
| PDH_2541 | YSSGWF | 6 | 7204 |
| PDH_2542 | IYYGSA | 6 | 7205 |
| PDH_2543 | PYYGSG | 6 | 7206 |
| PDH_2544 | PYYGSA | 6 | 7207 |
| PDH_2545 | PYYGSD | 6 | 7208 |
| PDH_2546 | VYYGSD | 6 | 7209 |
| PDH_2547 | AYYGSA | 6 | 7210 |
| PDH_2548 | VYYGSA | 6 | 7211 |
| PDH_2549 | NYYGSA | 6 | 7212 |
| PDH_2550 | YYYGSA | 6 | 7213 |
| PDH_2551 | AYYGSD | 6 | 7214 |
| PDH_2552 | NYYGSD | 6 | 7215 |
| PDH_2553 | YYYGSD | 6 | 7216 |
| PDH_2554 | FYYGSD | 6 | 7217 |
| PDH_2555 | NYYGSG | 6 | 7218 |
| PDH_2556 | YYYGSG | 6 | 3979 |
| PDH_2557 | FYYGSA | 6 | 7219 |
| PDH_2558 | FYYGSG | 6 | 7220 |
| PDH_2559 | AYYGSG | 6 | 7221 |
| PDH_2560 | LYYGSG | 6 | 7222 |
| PDH_2561 | DYYGSD | 6 | 7223 |
| PDH_2562 | LYYGSA | 6 | 7224 |
| PDH_2563 | TYYGSD | 6 | 7225 |
| PDH_2564 | DYYGSG | 6 | 7226 |
| PDH_2565 | DYYGSA | 6 | 7227 |
| PDH_2566 | LYYGSD | 6 | 7228 |
| PDH_2567 | HYYGSD | 6 | 7229 |
| PDH_2568 | TYYGSA | 6 | 7230 |
| PDH_2569 | TYYGSG | 6 | 7231 |
| PDH_2570 | HYYGSA | 6 | 7232 |
| PDH_2571 | SYYGSG | 6 | 7233 |
| PDH_2572 | HYYGSG | 6 | 7234 |
| PDH_2573 | SYYGSD | 6 | 7235 |
| PDH_2574 | VYYGSG | 6 | 7236 |
| PDH_2575 | SYYGSA | 6 | 7237 |
| PDH_2576 | IYYGSG | 6 | 7238 |
| PDH_2577 | IYYGSD | 6 | 7239 |
| PDH_2578 | VSSGYS | 6 | 7240 |
| PDH_2579 | VSSGYY | 6 | 7241 |
| PDH_2580 | FSSGYY | 6 | 7242 |
| PDH_2581 | ASSGYF | 6 | 7243 |
| PDH_2582 | ASSGYS | 6 | 7244 |
| PDH_2583 | FSSGYS | 6 | 7245 |
| PDH_2584 | SSSGYY | 6 | 7246 |
| PDH_2585 | ASSGYY | 6 | 7247 |
| PDH_2586 | FSSGYF | 6 | 7248 |
| PDH_2587 | HSSGYY | 6 | 7249 |
| PDH_2588 | DSSGYY | 6 | 4174 |
| PDH_2589 | HSSGYS | 6 | 7250 |
| PDH_2590 | SSSGYS | 6 | 7251 |
| PDH_2591 | DSSGYS | 6 | 7252 |
| PDH_2592 | DSSGYF | 6 | 7253 |
| PDH_2593 | HSSGYF | 6 | 7254 |
| PDH_2594 | PSSGYF | 6 | 7255 |
| PDH_2595 | SSSGYF | 6 | 7256 |
| PDH_2596 | YSSGYY | 6 | 7257 |
| PDH_2597 | YSSGYF | 6 | 7258 |
| PDH_2598 | YSSGYS | 6 | 7259 |
| PDH_2599 | PSSGYS | 6 | 7260 |
| PDH_2600 | PSSGYY | 6 | 7261 |
| PDH_2601 | LSSGYY | 6 | 7262 |
| PDH_2602 | LSSGYF | 6 | 7263 |
| PDH_2603 | LSSGYS | 6 | 7264 |
| PDH_2604 | VSSGYF | 6 | 7265 |
| PDH_2605 | TYDSSD | 6 | 7266 |
| PDH_2606 | YYDSSA | 6 | 7267 |
| PDH_2607 | YYDSSG | 6 | 4172 |
| PDH_2608 | LYDSSD | 6 | 7268 |
| PDH_2609 | LYDSSA | 6 | 7269 |
| PDH_2610 | PYDSSA | 6 | 7270 |
| PDH_2611 | LYDSSG | 6 | 7271 |
| PDH_2612 | PYDSSD | 6 | 7272 |
| PDH_2613 | VYDSSD | 6 | 7273 |
| PDH_2614 | HYDSSG | 6 | 7274 |
| PDH_2615 | VYDSSG | 6 | 7275 |
| PDH_2616 | VYDSSA | 6 | 7276 |
| PDH_2617 | PYDSSG | 6 | 7277 |
| PDH_2618 | SYDSSA | 6 | 7278 |
| PDH_2619 | FYDSSG | 6 | 7279 |
| PDH_2620 | NYDSSA | 6 | 7280 |
| PDH_2621 | SYDSSG | 6 | 7281 |
| PDH_2622 | FYDSSA | 6 | 7282 |
| PDH_2623 | NYDSSD | 6 | 7283 |
| PDH_2624 | SYDSSD | 6 | 7284 |
| PDH_2625 | FYDSSD | 6 | 7285 |
| PDH_2626 | DYDSSG | 6 | 7286 |
| PDH_2627 | AYDSSG | 6 | 7287 |
| PDH_2628 | NYDSSG | 6 | 7288 |
| PDH_2629 | IYDSSA | 6 | 7289 |
| PDH_2630 | DYDSSD | 6 | 7290 |
| PDH_2631 | IYDSSG | 6 | 7291 |
| PDH_2632 | AYDSSD | 6 | 7292 |
| PDH_2633 | DYDSSA | 6 | 7293 |
| PDH_2634 | IYDSSD | 6 | 7294 |
| PDH_2635 | HYDSSA | 6 | 7295 |
| PDH_2636 | AYDSSA | 6 | 7296 |
| PDH_2637 | HYDSSD | 6 | 7297 |
| PDH_2638 | TYDSSG | 6 | 7298 |
| PDH_2639 | TYDSSA | 6 | 7299 |
| PDH_2640 | YYDSSD | 6 | 7300 |
| PDH_2641 | TDFWSA | 6 | 7301 |
| PDH_2642 | ADFWSG | 6 | 7302 |
| PDH_2643 | PDFWSG | 6 | 7303 |
| PDH_2644 | VDFWSD | 6 | 7304 |
| PDH_2645 | TDFWSD | 6 | 7305 |
| PDH_2646 | HDFWSA | 6 | 7306 |
| PDH_2647 | HDFWSD | 6 | 7307 |
| PDH_2648 | TDFWSG | 6 | 7308 |
| PDH_2649 | LDFWSA | 6 | 7309 |
| PDH_2650 | LDFWSG | 6 | 7310 |
| PDH_2651 | HDFWSG | 6 | 7311 |
| PDH_2652 | LDFWSD | 6 | 7312 |
| PDH_2653 | FDFWSG | 6 | 7313 |
| PDH_2654 | DDFWSD | 6 | 7314 |
| PDH_2655 | VDFWSA | 6 | 7315 |
| PDH_2656 | SDFWSD | 6 | 7316 |
| PDH_2657 | SDFWSG | 6 | 7317 |
| PDH_2658 | NDFWSD | 6 | 7318 |
| PDH_2659 | SDFWSA | 6 | 7319 |
| PDH_2660 | NDFWSA | 6 | 7320 |
| PDH_2661 | NDFWSG | 6 | 7321 |
| PDH_2662 | VDFWSG | 6 | 7322 |
| PDH_2663 | IDFWSD | 6 | 7323 |
| PDH_2664 | IDFWSG | 6 | 7324 |
| PDH_2665 | FDFWSA | 6 | 7325 |
| PDH_2666 | ADFWSD | 6 | 7326 |
| PDH_2667 | IDFWSA | 6 | 7327 |
| PDH_2668 | FDFWSD | 6 | 7328 |
| PDH_2669 | DDFWSG | 6 | 7329 |
| PDH_2670 | ADFWSA | 6 | 7330 |
| PDH_2671 | YDFWSA | 6 | 7331 |
| PDH_2672 | PDFWSD | 6 | 7332 |
| PDH_2673 | YDFWSG | 6 | 4253 |
| PDH_2674 | DDFWSA | 6 | 7333 |
| PDH_2675 | PDFWSA | 6 | 7334 |
| PDH_2676 | YDFWSD | 6 | 7335 |
| PDH_2677 | DDSSGY | 6 | 7336 |
| PDH_2678 | LDSSGY | 6 | 7337 |
| PDH_2679 | HDSSGS | 6 | 7338 |
| PDH_2680 | DDSSGF | 6 | 7339 |
| PDH_2681 | DDSSGS | 6 | 7340 |
| PDH_2682 | LDSSGS | 6 | 7341 |
| PDH_2683 | HDSSGY | 6 | 7342 |
| PDH_2684 | SDSSGS | 6 | 7343 |
| PDH_2685 | SDSSGF | 6 | 7344 |
| PDH_2686 | PDSSGS | 6 | 7345 |
| PDH_2687 | SDSSGY | 6 | 7346 |
| PDH_2688 | PDSSGY | 6 | 7347 |
| PDH_2689 | ADSSGY | 6 | 7348 |
| PDH_2690 | ADSSGS | 6 | 7349 |
| PDH_2691 | ADSSGF | 6 | 7350 |
| PDH_2692 | YDSSGF | 6 | 7351 |
| PDH_2693 | VDSSGF | 6 | 7352 |
| PDH_2694 | FDSSGF | 6 | 7353 |
| PDH_2695 | VDSSGY | 6 | 7354 |
| PDH_2696 | YDSSGY | 6 | 4173 |
| PDH_2697 | FDSSGS | 6 | 7355 |
| PDH_2698 | VDSSGS | 6 | 7356 |
| PDH_2699 | YDSSGS | 6 | 7357 |
| PDH_2700 | FDSSGY | 6 | 7358 |
| PDH_2701 | LDSSGF | 6 | 7359 |
| PDH_2702 | HDSSGF | 6 | 7360 |
| PDH_2703 | PDSSGF | 6 | 7361 |
| PDH_2704 | EYFDWS | 6 | 7362 |
| PDH_2705 | QYFDWL | 6 | 7363 |
| PDH_2706 | RYFDWF | 6 | 7364 |
| PDH_2707 | AYFDWF | 6 | 7365 |
| PDH_2708 | PYFDWF | 6 | 7366 |
| PDH_2709 | PYFDWP | 6 | 7367 |
| PDH_2710 | LYFDWP | 6 | 7368 |
| PDH_2711 | EYFDWP | 6 | 7369 |
| PDH_2712 | EYFDWL | 6 | 7370 |
| PDH_2713 | RYFDWL | 6 | 4305 |
| PDH_2714 | LYFDWL | 6 | 7371 |
| PDH_2715 | PYFDWL | 6 | 7372 |
| PDH_2716 | LYFDWS | 6 | 7373 |
| PDH_2717 | QYFDWS | 6 | 7374 |
| PDH_2718 | QYFDWF | 6 | 7375 |
| PDH_2719 | VYFDWF | 6 | 7376 |
| PDH_2720 | RYFDWP | 6 | 7377 |
| PDH_2721 | AYFDWP | 6 | 7378 |
| PDH_2722 | LYFDWF | 6 | 7379 |
| PDH_2723 | AYFDWL | 6 | 7380 |
| PDH_2724 | GYFDWF | 6 | 7381 |
| PDH_2725 | GYFDWS | 6 | 7382 |
| PDH_2726 | VYFDWL | 6 | 7383 |
| PDH_2727 | VYFDWS | 6 | 7384 |
| PDH_2728 | VYFDWP | 6 | 7385 |
| PDH_2729 | RYFDWS | 6 | 7386 |
| PDH_2730 | PYFDWS | 6 | 7387 |
| PDH_2731 | QYFDWP | 6 | 7388 |
| PDH_2732 | EYFDWF | 6 | 7389 |
| PDH_2733 | AYFDWS | 6 | 7390 |
| PDH_2734 | GYFDWL | 6 | 7391 |
| PDH_2735 | GYFDWP | 6 | 7392 |
| PDH_2736 | CGSTSC | 6 | 7393 |
| PDH_2737 | CSGTSC | 6 | 7394 |
| PDH_2738 | CSSTSC | 6 | 3814 |
| PDH_2739 | CGGTSC | 6 | 7395 |
| PDH_2740 | PYYGSE | 6 | 7396 |
| PDH_2741 | VYYGSE | 6 | 7397 |
| PDH_2742 | AYYGSE | 6 | 7398 |
| PDH_2743 | NYYGSE | 6 | 7399 |
| PDH_2744 | FYYGSE | 6 | 7400 |
| PDH_2745 | YYYGSE | 6 | 7401 |
| PDH_2746 | DYYGSE | 6 | 7402 |
| PDH_2747 | TYYGSE | 6 | 7403 |
| PDH_2748 | HYYGSE | 6 | 7404 |
| PDH_2749 | LYYGSE | 6 | 7405 |
| PDH_2750 | IYYGSE | 6 | 7406 |
| PDH_2751 | SYYGSE | 6 | 7407 |
| PDH_2752 | CSSGSC | 6 | 7408 |
| PDH_2753 | CGGGSC | 6 | 7409 |
| PDH_2754 | CGSGSC | 6 | 7410 |
| PDH_2755 | CSGGSC | 6 | 3775 |
| PDH_2756 | PFWSGS | 6 | 7411 |
| PDH_2757 | DFWSGF | 6 | 7412 |
| PDH_2758 | PFWSGY | 6 | 7413 |
| PDH_2759 | AFWSGY | 6 | 7414 |
| PDH_2760 | AFWSGS | 6 | 7415 |
| PDH_2761 | AFWSGF | 6 | 7416 |
| PDH_2762 | PFWSGF | 6 | 7417 |
| PDH_2763 | VFWSGY | 6 | 7418 |
| PDH_2764 | YFWSGF | 6 | 7419 |
| PDH_2765 | IFWSGS | 6 | 7420 |
| PDH_2766 | VFWSGF | 6 | 7421 |
| PDH_2767 | VFWSGS | 6 | 7422 |
| PDH_2768 | IFWSGF | 6 | 7423 |
| PDH_2769 | IFWSGY | 6 | 7424 |
| PDH_2770 | SFWSGF | 6 | 7425 |
| PDH_2771 | YFWSGY | 6 | 7426 |
| PDH_2772 | FFWSGS | 6 | 7427 |
| PDH_2773 | YFWSGS | 6 | 7428 |
| PDH_2774 | FFWSGY | 6 | 7429 |
| PDH_2775 | LFWSGF | 6 | 7430 |
| PDH_2776 | TFWSGF | 6 | 7431 |
| PDH_2777 | NFWSGF | 6 | 7432 |
| PDH_2778 | HFWSGF | 6 | 7433 |
| PDH_2779 | NFWSGS | 6 | 7434 |
| PDH_2780 | SFWSGS | 6 | 7435 |
| PDH_2781 | TFWSGS | 6 | 7436 |
| PDH_2782 | NFWSGY | 6 | 7437 |
| PDH_2783 | DFWSGY | 6 | 4254 |
| PDH_2784 | LFWSGY | 6 | 7438 |
| PDH_2785 | HFWSGS | 6 | 7439 |
| PDH_2786 | SFWSGY | 6 | 7440 |
| PDH_2787 | TFWSGY | 6 | 7441 |
| PDH_2788 | DFWSGS | 6 | 7442 |
| PDH_2789 | LFWSGS | 6 | 7443 |
| PDH_2790 | HFWSGY | 6 | 7444 |
| PDH_2791 | FFWSGF | 6 | 7445 |
| PDH_2792 | DYYDSSG | 7 | 7446 |
| PDH_2793 | SYYDSSG | 7 | 7447 |
| PDH_2794 | IYYDSSG | 7 | 7448 |
| PDH_2795 | HYYDSSG | 7 | 7449 |
| PDH_2796 | SYYDSSA | 7 | 7450 |
| PDH_2797 | SYYDSSD | 7 | 7451 |
| PDH_2798 | IYYDSSA | 7 | 7452 |
| PDH_2799 | AYYDSSA | 7 | 7453 |
| PDH_2800 | IYYDSSD | 7 | 7454 |
| PDH_2801 | AYYDSSD | 7 | 7455 |
| PDH_2802 | HYYDSSD | 7 | 7456 |
| PDH_2803 | VYYDSSD | 7 | 7457 |
| PDH_2804 | HYYDSSA | 7 | 7458 |
| PDH_2805 | AYYDSSG | 7 | 7459 |
| PDH_2806 | VYYDSSA | 7 | 7460 |
| PDH_2807 | LYYDSSG | 7 | 7461 |
| PDH_2808 | VYYDSSG | 7 | 7462 |
| PDH_2809 | LYYDSSD | 7 | 7463 |
| PDH_2810 | FYYDSSG | 7 | 7464 |
| PDH_2811 | LYYDSSA | 7 | 7465 |
| PDH_2812 | FYYDSSD | 7 | 7466 |
| PDH_2813 | TYYDSSG | 7 | 7467 |
| PDH_2814 | PYYDSSG | 7 | 7468 |
| PDH_2815 | FYYDSSA | 7 | 7469 |
| PDH_2816 | TYYDSSD | 7 | 7470 |
| PDH_2817 | NYYDSSG | 7 | 7471 |
| PDH_2818 | TYYDSSA | 7 | 7472 |
| PDH_2819 | PYYDSSA | 7 | 7473 |
| PDH_2820 | YYYDSSG | 7 | 4167 |
| PDH_2821 | PYYDSSD | 7 | 7474 |
| PDH_2822 | NYYDSSA | 7 | 7475 |
| PDH_2823 | YYYDSSD | 7 | 7476 |
| PDH_2824 | NYYDSSD | 7 | 7477 |
| PDH_2825 | YYYDSSA | 7 | 7478 |
| PDH_2826 | DYYDSSD | 7 | 7479 |
| PDH_2827 | DYYDSSA | 7 | 7480 |
| PDH_2828 | FDILTGF | 7 | 7481 |
| PDH_2829 | FDILTGS | 7 | 7482 |
| PDH_2830 | LDILTGY | 7 | 7483 |
| PDH_2831 | YDILTGF | 7 | 7484 |
| PDH_2832 | LDILTGS | 7 | 7485 |
| PDH_2833 | SDILTGF | 7 | 7486 |
| PDH_2834 | IDILTGS | 7 | 7487 |
| PDH_2835 | PDILTGS | 7 | 7488 |
| PDH_2836 | PDILTGF | 7 | 7489 |
| PDH_2837 | IDILTGF | 7 | 7490 |
| PDH_2838 | IDILTGY | 7 | 7491 |
| PDH_2839 | PDILTGY | 7 | 7492 |
| PDH_2840 | YDILTGY | 7 | 4325 |
| PDH_2841 | DDILTGF | 7 | 7493 |
| PDH_2842 | YDILTGS | 7 | 7494 |
| PDH_2843 | HDILTGY | 7 | 7495 |
| PDH_2844 | TDILTGF | 7 | 7496 |
| PDH_2845 | VDILTGY | 7 | 7497 |
| PDH_2846 | LDILTGF | 7 | 7498 |
| PDH_2847 | VDILTGS | 7 | 7499 |
| PDH_2848 | HDILTGS | 7 | 7500 |
| PDH_2849 | ADILTGS | 7 | 7501 |
| PDH_2850 | HDILTGF | 7 | 7502 |
| PDH_2851 | NDILTGS | 7 | 7503 |
| PDH_2852 | NDILTGF | 7 | 7504 |
| PDH_2853 | ADILTGY | 7 | 7505 |
| PDH_2854 | VDILTGF | 7 | 7506 |
| PDH_2855 | TDILTGY | 7 | 7507 |
| PDH_2856 | ADILTGF | 7 | 7508 |
| PDH_2857 | NDILTGY | 7 | 7509 |
| PDH_2858 | TDILTGS | 7 | 7510 |
| PDH_2859 | SDILTGS | 7 | 7511 |
| PDH_2860 | DDILTGY | 7 | 7512 |
| PDH_2861 | SDILTGY | 7 | 7513 |
| PDH_2862 | DDILTGS | 7 | 7514 |
| PDH_2863 | FDILTGY | 7 | 7515 |
| PDH_2864 | SYDFWSA | 7 | 7516 |
| PDH_2865 | FYDFWSG | 7 | 7517 |
| PDH_2866 | IYDFWSD | 7 | 7518 |
| PDH_2867 | LYDFWSD | 7 | 7519 |
| PDH_2868 | AYDFWSD | 7 | 7520 |
| PDH_2869 | IYDFWSA | 7 | 7521 |
| PDH_2870 | PYDFWSD | 7 | 7522 |
| PDH_2871 | AYDFWSA | 7 | 7523 |
| PDH_2872 | SYDFWSG | 7 | 7524 |
| PDH_2873 | FYDFWSA | 7 | 7525 |
| PDH_2874 | PYDFWSA | 7 | 7526 |
| PDH_2875 | YYDFWSG | 7 | 4248 |
| PDH_2876 | FYDFWSD | 7 | 7527 |
| PDH_2877 | IYDFWSG | 7 | 7528 |
| PDH_2878 | PYDFWSG | 7 | 7529 |
| PDH_2879 | YYDFWSA | 7 | 7530 |
| PDH_2880 | YYDFWSD | 7 | 7531 |
| PDH_2881 | NYDFWSD | 7 | 7532 |
| PDH_2882 | VYDFWSA | 7 | 7533 |
| PDH_2883 | NYDFWSA | 7 | 7534 |
| PDH_2884 | VYDFWSD | 7 | 7535 |
| PDH_2885 | VYDFWSG | 7 | 7536 |
| PDH_2886 | NYDFWSG | 7 | 7537 |
| PDH_2887 | DYDFWSA | 7 | 7538 |
| PDH_2888 | DYDFWSD | 7 | 7539 |
| PDH_2889 | DYDFWSG | 7 | 7540 |
| PDH_2890 | HYDFWSG | 7 | 7541 |
| PDH_2891 | TYDFWSG | 7 | 7542 |
| PDH_2892 | HYDFWSA | 7 | 7543 |
| PDH_2893 | LYDFWSG | 7 | 7544 |
| PDH_2894 | HYDFWSD | 7 | 7545 |
| PDH_2895 | TYDFWSA | 7 | 7546 |
| PDH_2896 | SYDFWSD | 7 | 7547 |
| PDH_2897 | TYDFWSD | 7 | 7548 |
| PDH_2898 | LYDFWSA | 7 | 7549 |
| PDH_2899 | AYDFWSG | 7 | 7550 |
| PDH_2900 | SCSSTSC | 7 | 7551 |
| PDH_2901 | HCSSTSC | 7 | 7552 |
| PDH_2902 | PCSSTSC | 7 | 7553 |
| PDH_2903 | ACSSTSC | 7 | 7554 |
| PDH_2904 | VCSSTSC | 7 | 7555 |
| PDH_2905 | LCSSTSC | 7 | 7556 |
| PDH_2906 | YCSSTSC | 7 | 3812 |
| PDH_2907 | FCSSTSC | 7 | 7557 |
| PDH_2908 | DCSSTSC | 7 | 7558 |
| PDH_2909 | RYSSSWS | 7 | 7559 |
| PDH_2910 | VYSSSWY | 7 | 7560 |
| PDH_2911 | GYSSSWY | 7 | 4435 |
| PDH_2912 | VYSSSWS | 7 | 7561 |
| PDH_2913 | TYSSSWY | 7 | 7562 |
| PDH_2914 | TYSSSWF | 7 | 7563 |
| PDH_2915 | TYSSSWS | 7 | 7564 |
| PDH_2916 | GYSSSWF | 7 | 7565 |
| PDH_2917 | LYSSSWF | 7 | 7566 |
| PDH_2918 | AYSSSWS | 7 | 7567 |
| PDH_2919 | SYSSSWF | 7 | 7568 |
| PDH_2920 | WYSSSWS | 7 | 7569 |
| PDH_2921 | WYSSSWF | 7 | 7570 |
| PDH_2922 | MYSSSWS | 7 | 7571 |
| PDH_2923 | SYSSSWS | 7 | 7572 |
| PDH_2924 | LYSSSWY | 7 | 7573 |
| PDH_2925 | AYSSSWY | 7 | 7574 |
| PDH_2926 | AYSSSWF | 7 | 7575 |
| PDH_2927 | LYSSSWS | 7 | 7576 |
| PDH_2928 | WYSSSWY | 7 | 7577 |
| PDH_2929 | VYSSSWF | 7 | 7578 |
| PDH_2930 | SYSSSWY | 7 | 7579 |
| PDH_2931 | RYSSSWF | 7 | 7580 |
| PDH_2932 | MYSSSWF | 7 | 7581 |
| PDH_2933 | RYSSSWY | 7 | 7582 |
| PDH_2934 | MYSSSWY | 7 | 7583 |
| PDH_2935 | GYSSSWS | 7 | 7584 |
| PDH_2936 | IYDSSGY | 7 | 7585 |
| PDH_2937 | PYDSSGS | 7 | 7586 |
| PDH_2938 | VYDSSGF | 7 | 7587 |
| PDH_2939 | PYDSSGY | 7 | 7588 |
| PDH_2940 | NYDSSGS | 7 | 7589 |
| PDH_2941 | LYDSSGY | 7 | 7590 |
| PDH_2942 | NYDSSGY | 7 | 7591 |
| PDH_2943 | LYDSSGS | 7 | 7592 |
| PDH_2944 | VYDSSGY | 7 | 7593 |
| PDH_2945 | VYDSSGS | 7 | 7594 |
| PDH_2946 | LYDSSGF | 7 | 7595 |
| PDH_2947 | NYDSSGF | 7 | 7596 |
| PDH_2948 | YYDSSGY | 7 | 4168 |
| PDH_2949 | YYDSSGS | 7 | 7597 |
| PDH_2950 | DYDSSGS | 7 | 7598 |
| PDH_2951 | TYDSSGY | 7 | 7599 |
| PDH_2952 | TYDSSGF | 7 | 7600 |
| PDH_2953 | TYDSSGS | 7 | 7601 |
| PDH_2954 | YYDSSGF | 7 | 7602 |
| PDH_2955 | AYDSSGS | 7 | 7603 |
| PDH_2956 | HYDSSGY | 7 | 7604 |
| PDH_2957 | AYDSSGY | 7 | 7605 |
| PDH_2958 | HYDSSGF | 7 | 7606 |
| PDH_2959 | HYDSSGS | 7 | 7607 |
| PDH_2960 | FYDSSGF | 7 | 7608 |
| PDH_2961 | IYDSSGF | 7 | 7609 |
| PDH_2962 | DYDSSGY | 7 | 7610 |
| PDH_2963 | DYDSSGF | 7 | 7611 |
| PDH_2964 | PYDSSGF | 7 | 7612 |
| PDH_2965 | SYDSSGS | 7 | 7613 |
| PDH_2966 | SYDSSGF | 7 | 7614 |
| PDH_2967 | AYDSSGF | 7 | 7615 |
| PDH_2968 | FYDSSGY | 7 | 7616 |
| PDH_2969 | SYDSSGY | 7 | 7617 |
| PDH_2970 | IYDSSGS | 7 | 7618 |
| PDH_2971 | FYDSSGS | 7 | 7619 |
| PDH_2972 | HYYGSGI | 7 | 7620 |
| PDH_2973 | SYYGSGI | 7 | 7621 |
| PDH_2974 | AYYGSGT | 7 | 7622 |
| PDH_2975 | DYYGSGI | 7 | 7623 |
| PDH_2976 | VYYGSGT | 7 | 7624 |
| PDH_2977 | AYYGSGS | 7 | 7625 |
| PDH_2978 | VYYGSGI | 7 | 7626 |
| PDH_2979 | VYYGSGS | 7 | 7627 |
| PDH_2980 | HYYGSGS | 7 | 7628 |
| PDH_2981 | LYYGSGS | 7 | 7629 |
| PDH_2982 | HYYGSGT | 7 | 7630 |
| PDH_2983 | LYYGSGT | 7 | 7631 |
| PDH_2984 | PYYGSGS | 7 | 7632 |
| PDH_2985 | SYYGSGS | 7 | 7633 |
| PDH_2986 | NYYGSGS | 7 | 7634 |
| PDH_2987 | IYYGSGS | 7 | 7635 |
| PDH_2988 | DYYGSGT | 7 | 7636 |
| PDH_2989 | PYYGSGI | 7 | 7637 |
| PDH_2990 | PYYGSGT | 7 | 7638 |
| PDH_2991 | SYYGSGT | 7 | 7639 |
| PDH_2992 | FYYGSGS | 7 | 7640 |
| PDH_2993 | YYYGSGS | 7 | 3975 |
| PDH_2994 | NYYGSGT | 7 | 7641 |
| PDH_2995 | IYYGSGT | 7 | 7642 |
| PDH_2996 | DYYGSGS | 7 | 7643 |
| PDH_2997 | TYYGSGS | 7 | 7644 |
| PDH_2998 | FYYGSGT | 7 | 7645 |
| PDH_2999 | YYYGSGT | 7 | 7646 |
| PDH_3000 | TYYGSGT | 7 | 7647 |
| PDH_3001 | YYYGSGI | 7 | 7648 |
| PDH_3002 | FYYGSGI | 7 | 7649 |
| PDH_3003 | AYYGSGI | 7 | 7650 |
| PDH_3004 | TYYGSGI | 7 | 7651 |
| PDH_3005 | IYYGSGI | 7 | 7652 |
| PDH_3006 | LYYGSGI | 7 | 7653 |
| PDH_3007 | NYYGSGI | 7 | 7654 |
| PDH_3008 | TYSSGWF | 7 | 7655 |
| PDH_3009 | TYSSGWS | 7 | 7656 |
| PDH_3010 | VYSSGWF | 7 | 7657 |
| PDH_3011 | GYSSGWF | 7 | 7658 |
| PDH_3012 | MYSSGWS | 7 | 7659 |
| PDH_3013 | SYSSGWF | 7 | 7660 |
| PDH_3014 | MYSSGWY | 7 | 7661 |
| PDH_3015 | LYSSGWY | 7 | 7662 |
| PDH_3016 | MYSSGWF | 7 | 7663 |
| PDH_3017 | WYSSGWS | 7 | 7664 |
| PDH_3018 | WYSSGWY | 7 | 7665 |
| PDH_3019 | AYSSGWS | 7 | 7666 |
| PDH_3020 | RYSSGWF | 7 | 7667 |
| PDH_3021 | LYSSGWF | 7 | 7668 |
| PDH_3022 | AYSSGWY | 7 | 7669 |
| PDH_3023 | RYSSGWY | 7 | 7670 |
| PDH_3024 | SYSSGWY | 7 | 7671 |
| PDH_3025 | RYSSGWS | 7 | 7672 |
| PDH_3026 | GYSSGWY | 7 | 4456 |
| PDH_3027 | WYSSGWF | 7 | 7673 |
| PDH_3028 | AYSSGWF | 7 | 7674 |
| PDH_3029 | GYSSGWS | 7 | 7675 |
| PDH_3030 | VYSSGWY | 7 | 7676 |
| PDH_3031 | VYSSGWS | 7 | 7677 |
| PDH_3032 | LYSSGWS | 7 | 7678 |
| PDH_3033 | TYSSGWY | 7 | 7679 |
| PDH_3034 | SYSSGWS | 7 | 7680 |
| PDH_3035 | FCSGGSC | 7 | 7681 |
| PDH_3036 | LCSGGSC | 7 | 7682 |
| PDH_3037 | SCSGGSC | 7 | 7683 |
| PDH_3038 | YCSGGSC | 7 | 3773 |
| PDH_3039 | DCSGGSC | 7 | 7684 |
| PDH_3040 | HCSGGSC | 7 | 7685 |
| PDH_3041 | PCSGGSC | 7 | 7686 |
| PDH_3042 | ACSGGSC | 7 | 7687 |
| PDH_3043 | VCSGGSC | 7 | 7688 |
| PDH_3044 | CSGGSCH | 7 | 7689 |
| PDH_3045 | CSGGSCL | 7 | 7690 |
| PDH_3046 | CSGGSCS | 7 | 7691 |
| PDH_3047 | CSGGSCY | 7 | 3774 |
| PDH_3048 | CSGGSCP | 7 | 7692 |
| PDH_3049 | CSGGSCF | 7 | 7693 |
| PDH_3050 | CSSTSCY | 7 | 3813 |
| PDH_3051 | CSSTSCL | 7 | 7694 |
| PDH_3052 | CSSTSCF | 7 | 7695 |
| PDH_3053 | CSSTSCH | 7 | 7696 |
| PDH_3054 | CSSTSCS | 7 | 7697 |
| PDH_3055 | CSSTSCP | 7 | 7698 |
| PDH_3056 | ICGGDCF | 7 | 7699 |
| PDH_3057 | VCGGDCS | 7 | 7700 |
| PDH_3058 | DCGGDCF | 7 | 7701 |
| PDH_3059 | SCGGDCF | 7 | 7702 |
| PDH_3060 | NCGGDCY | 7 | 7703 |
| PDH_3061 | VCGGDCY | 7 | 7704 |
| PDH_3062 | SCGGDCS | 7 | 7705 |
| PDH_3063 | NCGGDCS | 7 | 7706 |
| PDH_3064 | HCGGDCF | 7 | 7707 |
| PDH_3065 | LCGGDCS | 7 | 7708 |
| PDH_3066 | LCGGDCY | 7 | 7709 |
| PDH_3067 | ICGGDCY | 7 | 7710 |
| PDH_3068 | LCGGDCF | 7 | 7711 |
| PDH_3069 | ICGGDCS | 7 | 7712 |
| PDH_3070 | VCGGDCF | 7 | 7713 |
| PDH_3071 | HCGGDCS | 7 | 7714 |
| PDH_3072 | YCGGDCF | 7 | 7715 |
| PDH_3073 | HCGGDCY | 7 | 7716 |
| PDH_3074 | FCGGDCF | 7 | 7717 |
| PDH_3075 | YCGGDCS | 7 | 7718 |
| PDH_3076 | DCGGDCS | 7 | 7719 |
| PDH_3077 | YCGGDCY | 7 | 3866 |
| PDH_3078 | DCGGDCY | 7 | 7720 |
| PDH_3079 | PCGGDCF | 7 | 7721 |
| PDH_3080 | FCGGDCS | 7 | 7722 |
| PDH_3081 | FCGGDCY | 7 | 7723 |
| PDH_3082 | ACGGDCF | 7 | 7724 |
| PDH_3083 | ACGGDCY | 7 | 7725 |
| PDH_3084 | ACGGDCS | 7 | 7726 |
| PDH_3085 | PCGGDCY | 7 | 7727 |
| PDH_3086 | PCGGDCS | 7 | 7728 |
| PDH_3087 | SCGGDCY | 7 | 7729 |
| PDH_3088 | NCGGDCF | 7 | 7730 |
| PDH_3089 | TCGGDCS | 7 | 7731 |
| PDH_3090 | TCGGDCY | 7 | 7732 |
| PDH_3091 | TCGGDCF | 7 | 7733 |
| PDH_3092 | NDFWSGF | 7 | 7734 |
| PDH_3093 | HDFWSGF | 7 | 7735 |
| PDH_3094 | SDFWSGF | 7 | 7736 |
| PDH_3095 | NDFWSGY | 7 | 7737 |
| PDH_3096 | HDFWSGS | 7 | 7738 |
| PDH_3097 | DDFWSGF | 7 | 7739 |
| PDH_3098 | HDFWSGY | 7 | 7740 |
| PDH_3099 | SDFWSGY | 7 | 7741 |
| PDH_3100 | FDFWSGF | 7 | 7742 |
| PDH_3101 | PDFWSGY | 7 | 7743 |
| PDH_3102 | IDFWSGF | 7 | 7744 |
| PDH_3103 | SDFWSGS | 7 | 7745 |
| PDH_3104 | PDFWSGS | 7 | 7746 |
| PDH_3105 | TDFWSGF | 7 | 7747 |
| PDH_3106 | LDFWSGS | 7 | 7748 |
| PDH_3107 | DDFWSGY | 7 | 7749 |
| PDH_3108 | LDFWSGY | 7 | 7750 |
| PDH_3109 | FDFWSGS | 7 | 7751 |
| PDH_3110 | ADFWSGF | 7 | 7752 |
| PDH_3111 | FDFWSGY | 7 | 7753 |
| PDH_3112 | TDFWSGS | 7 | 7754 |
| PDH_3113 | PDFWSGF | 7 | 7755 |
| PDH_3114 | VDFWSGF | 7 | 7756 |
| PDH_3115 | TDFWSGY | 7 | 7757 |
| PDH_3116 | IDFWSGY | 7 | 7758 |
| PDH_3117 | DDFWSGS | 7 | 7759 |
| PDH_3118 | YDFWSGS | 7 | 7760 |
| PDH_3119 | YDFWSGF | 7 | 7761 |
| PDH_3120 | IDFWSGS | 7 | 7762 |
| PDH_3121 | NDFWSGS | 7 | 7763 |
| PDH_3122 | YDFWSGY | 7 | 4249 |
| PDH_3123 | LDFWSGF | 7 | 7764 |
| PDH_3124 | ADFWSGY | 7 | 7765 |
| PDH_3125 | VDFWSGS | 7 | 7766 |
| PDH_3126 | ADFWSGS | 7 | 7767 |
| PDH_3127 | VDFWSGY | 7 | 7768 |
| PDH_3128 | YDSSGYS | 7 | 7769 |
| PDH_3129 | VDSSGYF | 7 | 7770 |
| PDH_3130 | VDSSGYS | 7 | 7771 |
| PDH_3131 | ADSSGYS | 7 | 7772 |
| PDH_3132 | HDSSGYF | 7 | 7773 |
| PDH_3133 | ADSSGYY | 7 | 7774 |
| PDH_3134 | DDSSGYY | 7 | 7775 |
| PDH_3135 | DDSSGYS | 7 | 7776 |
| PDH_3136 | SDSSGYS | 7 | 7777 |
| PDH_3137 | SDSSGYF | 7 | 7778 |
| PDH_3138 | PDSSGYS | 7 | 7779 |
| PDH_3139 | SDSSGYY | 7 | 7780 |
| PDH_3140 | PDSSGYY | 7 | 7781 |
| PDH_3141 | HDSSGYY | 7 | 7782 |
| PDH_3142 | PDSSGYF | 7 | 7783 |
| PDH_3143 | FDSSGYF | 7 | 7784 |
| PDH_3144 | HDSSGYS | 7 | 7785 |
| PDH_3145 | ADSSGYF | 7 | 7786 |
| PDH_3146 | DDSSGYF | 7 | 7787 |
| PDH_3147 | LDSSGYF | 7 | 7788 |
| PDH_3148 | LDSSGYY | 7 | 7789 |
| PDH_3149 | LDSSGYS | 7 | 7790 |
| PDH_3150 | FDSSGYY | 7 | 7791 |
| PDH_3151 | FDSSGYS | 7 | 7792 |
| PDH_3152 | YDSSGYF | 7 | 7793 |
| PDH_3153 | YDSSGYY | 7 | 4169 |
| PDH_3154 | VDSSGYY | 7 | 7794 |
| PDH_3155 | EYCGGDC | 7 | 7795 |
| PDH_3156 | QYCGGDC | 7 | 7796 |
| PDH_3157 | AYCGGDC | 7 | 3865 |
| PDH_3158 | IYCGGDC | 7 | 7797 |
| PDH_3159 | TYCGGDC | 7 | 7798 |
| PDH_3160 | PYCGGDC | 7 | 7799 |
| PDH_3161 | LYCGGDC | 7 | 7800 |
| PDH_3162 | VYCGGDC | 7 | 7801 |
| PDH_3163 | KYCGGDC | 7 | 7802 |
| PDH_3164 | VYYDSSGF | 8 | 7803 |
| PDH_3165 | IYYDSSGF | 8 | 7804 |
| PDH_3166 | YYYDSSGY | 8 | 4164 |
| PDH_3167 | PYYDSSGF | 8 | 7805 |
| PDH_3168 | HYYDSSGF | 8 | 7806 |
| PDH_3169 | HYYDSSGY | 8 | 7807 |
| PDH_3170 | AYYDSSGF | 8 | 7808 |
| PDH_3171 | HYYDSSGS | 8 | 7809 |
| PDH_3172 | DYYDSSGY | 8 | 7810 |
| PDH_3173 | DYYDSSGS | 8 | 7811 |
| PDH_3174 | YYYDSSGS | 8 | 7812 |
| PDH_3175 | SYYDSSGF | 8 | 7813 |
| PDH_3176 | LYYDSSGF | 8 | 7814 |
| PDH_3177 | NYYDSSGF | 8 | 7815 |
| PDH_3178 | NYYDSSGY | 8 | 7816 |
| PDH_3179 | IYYDSSGY | 8 | 7817 |
| PDH_3180 | SYYDSSGS | 8 | 7818 |
| PDH_3181 | AYYDSSGS | 8 | 7819 |
| PDH_3182 | IYYDSSGS | 8 | 7820 |
| PDH_3183 | AYYDSSGY | 8 | 7821 |
| PDH_3184 | DYYDSSGF | 8 | 7822 |
| PDH_3185 | SYYDSSGY | 8 | 7823 |
| PDH_3186 | NYYDSSGS | 8 | 7824 |
| PDH_3187 | LYYDSSGY | 8 | 7825 |
| PDH_3188 | PYYDSSGS | 8 | 7826 |
| PDH_3189 | LYYDSSGS | 8 | 7827 |
| PDH_3190 | PYYDSSGY | 8 | 7828 |
| PDH_3191 | TYYDSSGY | 8 | 7829 |
| PDH_3192 | TYYDSSGS | 8 | 7830 |
| PDH_3193 | FYYDSSGF | 8 | 7831 |
| PDH_3194 | FYYDSSGY | 8 | 7832 |
| PDH_3195 | FYYDSSGS | 8 | 7833 |
| PDH_3196 | VYYDSSGS | 8 | 7834 |
| PDH_3197 | TYYDSSGF | 8 | 7835 |
| PDH_3198 | YYYDSSGF | 8 | 7836 |
| PDH_3199 | VYYDSSGY | 8 | 7837 |
| PDH_3200 | TYYGSGSS | 8 | 7838 |
| PDH_3201 | SYYGSGSY | 8 | 7839 |
| PDH_3202 | SYYGSGSS | 8 | 7840 |
| PDH_3203 | HYYGSGSF | 8 | 7841 |
| PDH_3204 | PYYGSGSF | 8 | 7842 |
| PDH_3205 | AYYGSGSS | 8 | 7843 |
| PDH_3206 | AYYGSGSF | 8 | 7844 |
| PDH_3207 | AYYGSGSY | 8 | 7845 |
| PDH_3208 | YYYGSGSF | 8 | 7846 |
| PDH_3209 | TYYGSGSY | 8 | 7847 |
| PDH_3210 | YYYGSGSY | 8 | 3972 |
| PDH_3211 | PYYGSGSS | 8 | 7848 |
| PDH_3212 | PYYGSGSY | 8 | 7849 |
| PDH_3213 | DYYGSGSY | 8 | 7850 |
| PDH_3214 | VYYGSGSY | 8 | 7851 |
| PDH_3215 | VYYGSGSF | 8 | 7852 |
| PDH_3216 | YYYGSGSS | 8 | 7853 |
| PDH_3217 | LYYGSGSF | 8 | 7854 |
| PDH_3218 | LYYGSGSY | 8 | 7855 |
| PDH_3219 | DYYGSGSS | 8 | 7856 |
| PDH_3220 | VYYGSGSS | 8 | 7857 |
| PDH_3221 | IYYGSGSS | 8 | 7858 |
| PDH_3222 | FYYGSGSY | 8 | 7859 |
| PDH_3223 | FYYGSGSS | 8 | 7860 |
| PDH_3224 | LYYGSGSS | 8 | 7861 |
| PDH_3225 | SYYGSGSF | 8 | 7862 |
| PDH_3226 | IYYGSGSY | 8 | 7863 |
| PDH_3227 | IYYGSGSF | 8 | 7864 |
| PDH_3228 | FYYGSGSF | 8 | 7865 |
| PDH_3229 | DYYGSGSF | 8 | 7866 |
| PDH_3230 | NYYGSGSS | 8 | 7867 |
| PDH_3231 | NYYGSGSY | 8 | 7868 |
| PDH_3232 | TYYGSGSF | 8 | 7869 |
| PDH_3233 | HYYGSGSY | 8 | 7870 |
| PDH_3234 | HYYGSGSS | 8 | 7871 |
| PDH_3235 | NYYGSGSF | 8 | 7872 |
| PDH_3236 | AYCSSTSC | 8 | 7873 |
| PDH_3237 | PYCSSTSC | 8 | 7874 |
| PDH_3238 | RYCSSTSC | 8 | 7875 |
| PDH_3239 | IYCSSTSC | 8 | 7876 |
| PDH_3240 | LYCSSTSC | 8 | 7877 |
| PDH_3241 | VYCSSTSC | 8 | 7878 |
| PDH_3242 | TYCSSTSC | 8 | 7879 |
| PDH_3243 | SYCSSTSC | 8 | 7880 |
| PDH_3244 | GYCSSTSC | 8 | 3809 |
| PDH_3245 | IYCSGGSC | 8 | 7881 |
| PDH_3246 | VYCSGGSC | 8 | 7882 |
| PDH_3247 | LYCSGGSC | 8 | 7883 |
| PDH_3248 | AYCSGGSC | 8 | 7884 |
| PDH_3249 | TYCSGGSC | 8 | 7885 |
| PDH_3250 | GYCSGGSC | 8 | 3770 |
| PDH_3251 | RYCSGGSC | 8 | 7886 |
| PDH_3252 | PYCSGGSC | 8 | 7887 |
| PDH_3253 | SYCSGGSC | 8 | 7888 |
| PDH_3254 | FYDFWSGY | 8 | 7889 |
| PDH_3255 | AYDFWSGF | 8 | 7890 |
| PDH_3256 | NYDFWSGF | 8 | 7891 |
| PDH_3257 | IYDFWSGF | 8 | 7892 |
| PDH_3258 | DYDFWSGS | 8 | 7893 |
| PDH_3259 | DYDFWSGY | 8 | 7894 |
| PDH_3260 | NYDFWSGY | 8 | 7895 |
| PDH_3261 | VYDFWSGF | 8 | 7896 |
| PDH_3262 | VYDFWSGS | 8 | 7897 |
| PDH_3263 | YYDFWSGF | 8 | 7898 |
| PDH_3264 | PYDFWSGF | 8 | 7899 |
| PDH_3265 | FYDFWSGS | 8 | 7900 |
| PDH_3266 | HYDFWSGF | 8 | 7901 |
| PDH_3267 | HYDFWSGY | 8 | 7902 |
| PDH_3268 | YYDFWSGS | 8 | 7903 |
| PDH_3269 | PYDFWSGY | 8 | 7904 |
| PDH_3270 | PYDFWSGS | 8 | 7905 |
| PDH_3271 | VYDFWSGY | 8 | 7906 |
| PDH_3272 | SYDFWSGS | 8 | 7907 |
| PDH_3273 | YYDFWSGY | 8 | 4245 |
| PDH_3274 | LYDFWSGF | 8 | 7908 |
| PDH_3275 | HYDFWSGS | 8 | 7909 |
| PDH_3276 | SYDFWSGY | 8 | 7910 |
| PDH_3277 | SYDFWSGF | 8 | 7911 |
| PDH_3278 | LYDFWSGS | 8 | 7912 |
| PDH_3279 | TYDFWSGF | 8 | 7913 |
| PDH_3280 | LYDFWSGY | 8 | 7914 |
| PDH_3281 | AYDFWSGY | 8 | 7915 |
| PDH_3282 | AYDFWSGS | 8 | 7916 |
| PDH_3283 | TYDFWSGS | 8 | 7917 |
| PDH_3284 | IYDFWSGY | 8 | 7918 |
| PDH_3285 | TYDFWSGY | 8 | 7919 |
| PDH_3286 | NYDFWSGS | 8 | 7920 |
| PDH_3287 | DYDFWSGF | 8 | 7921 |
| PDH_3288 | IYDFWSGS | 8 | 7922 |
| PDH_3289 | FYDFWSGF | 8 | 7923 |
| PDH_3290 | HDILTGYS | 8 | 7924 |
| PDH_3291 | PDILTGYY | 8 | 7925 |
| PDH_3292 | PDILTGYF | 8 | 7926 |
| PDH_3293 | TDILTGYS | 8 | 7927 |
| PDH_3294 | HDILTGYY | 8 | 7928 |
| PDH_3295 | YDILTGYF | 8 | 7929 |
| PDH_3296 | IDILTGYS | 8 | 7930 |
| PDH_3297 | IDILTGYY | 8 | 7931 |
| PDH_3298 | IDILTGYF | 8 | 7932 |
| PDH_3299 | LDILTGYF | 8 | 7933 |
| PDH_3300 | LDILTGYY | 8 | 7934 |
| PDH_3301 | LDILTGYS | 8 | 7935 |
| PDH_3302 | DDILTGYF | 8 | 7936 |
| PDH_3303 | FDILTGYF | 8 | 7937 |
| PDH_3304 | SDILTGYF | 8 | 7938 |
| PDH_3305 | ADILTGYY | 8 | 7939 |
| PDH_3306 | VDILTGYY | 8 | 7940 |
| PDH_3307 | VDILTGYS | 8 | 7941 |
| PDH_3308 | ADILTGYS | 8 | 7942 |
| PDH_3309 | DDILTGYS | 8 | 7943 |
| PDH_3310 | FDILTGYS | 8 | 7944 |
| PDH_3311 | SDILTGYS | 8 | 7945 |
| PDH_3312 | DDILTGYY | 8 | 7946 |
| PDH_3313 | SDILTGYY | 8 | 7947 |
| PDH_3314 | YDILTGYY | 8 | 4322 |
| PDH_3315 | FDILTGYY | 8 | 7948 |
| PDH_3316 | HDILTGYF | 8 | 7949 |
| PDH_3317 | NDILTGYY | 8 | 7950 |
| PDH_3318 | NDILTGYF | 8 | 7951 |
| PDH_3319 | PDILTGYS | 8 | 7952 |
| PDH_3320 | VDILTGYF | 8 | 7953 |
| PDH_3321 | TDILTGYY | 8 | 7954 |
| PDH_3322 | TDILTGYF | 8 | 7955 |
| PDH_3323 | YDILTGYS | 8 | 7956 |
| PDH_3324 | NDILTGYS | 8 | 7957 |
| PDH_3325 | ADILTGYF | 8 | 7958 |
| PDH_3326 | SCSGGSCS | 8 | 7959 |
| PDH_3327 | HCSGGSCF | 8 | 7960 |
| PDH_3328 | DCSGGSCS | 8 | 7961 |
| PDH_3329 | PCSGGSCF | 8 | 7962 |
| PDH_3330 | PCSGGSCY | 8 | 7963 |
| PDH_3331 | SCSGGSCY | 8 | 7964 |
| PDH_3332 | PCSGGSCS | 8 | 7965 |
| PDH_3333 | LCSGGSCY | 8 | 7966 |
| PDH_3334 | ACSGGSCY | 8 | 7967 |
| PDH_3335 | ACSGGSCS | 8 | 7968 |
| PDH_3336 | ACSGGSCF | 8 | 7969 |
| PDH_3337 | VCSGGSCY | 8 | 7970 |
| PDH_3338 | VCSGGSCF | 8 | 7971 |
| PDH_3339 | VCSGGSCS | 8 | 7972 |
| PDH_3340 | YCSGGSCS | 8 | 7973 |
| PDH_3341 | YCSGGSCF | 8 | 7974 |
| PDH_3342 | DCSGGSCF | 8 | 7975 |
| PDH_3343 | DCSGGSCY | 8 | 7976 |
| PDH_3344 | FCSGGSCS | 8 | 7977 |
| PDH_3345 | FCSGGSCY | 8 | 7978 |
| PDH_3346 | FCSGGSCF | 8 | 7979 |
| PDH_3347 | SCSGGSCF | 8 | 7980 |
| PDH_3348 | YCSGGSCY | 8 | 3771 |
| PDH_3349 | LCSGGSCF | 8 | 7981 |
| PDH_3350 | LCSGGSCS | 8 | 7982 |
| PDH_3351 | HCSGGSCS | 8 | 7983 |
| PDH_3352 | HCSGGSCY | 8 | 7984 |
| PDH_3353 | ACSSTSCY | 8 | 7985 |
| PDH_3354 | YCSSTSCF | 8 | 7986 |
| PDH_3355 | FCSSTSCY | 8 | 7987 |
| PDH_3356 | PCSSTSCF | 8 | 7988 |
| PDH_3357 | FCSSTSCS | 8 | 7989 |
| PDH_3358 | DCSSTSCF | 8 | 7990 |
| PDH_3359 | VCSSTSCS | 8 | 7991 |
| PDH_3360 | VCSSTSCF | 8 | 7992 |
| PDH_3361 | LCSSTSCS | 8 | 7993 |
| PDH_3362 | VCSSTSCY | 8 | 7994 |
| PDH_3363 | ACSSTSCS | 8 | 7995 |
| PDH_3364 | LCSSTSCY | 8 | 7996 |
| PDH_3365 | LCSSTSCF | 8 | 7997 |
| PDH_3366 | FCSSTSCF | 8 | 7998 |
| PDH_3367 | HCSSTSCY | 8 | 7999 |
| PDH_3368 | HCSSTSCS | 8 | 8000 |
| PDH_3369 | HCSSTSCF | 8 | 8001 |
| PDH_3370 | SCSSTSCF | 8 | 8002 |
| PDH_3371 | SCSSTSCS | 8 | 8003 |
| PDH_3372 | YCSSTSCS | 8 | 8004 |
| PDH_3373 | DCSSTSCY | 8 | 8005 |
| PDH_3374 | DCSSTSCS | 8 | 8006 |
| PDH_3375 | SCSSTSCY | 8 | 8007 |
| PDH_3376 | PCSSTSCS | 8 | 8008 |
| PDH_3377 | ACSSTSCF | 8 | 8009 |
| PDH_3378 | PCSSTSCY | 8 | 8010 |
| PDH_3379 | YCSSTSCY | 8 | 3810 |
| PDH_3380 | LYCGGDCS | 8 | 8011 |
| PDH_3381 | EYCGGDCS | 8 | 8012 |
| PDH_3382 | LYCGGDCY | 8 | 8013 |
| PDH_3383 | VYCGGDCS | 8 | 8014 |
| PDH_3384 | VYCGGDCY | 8 | 8015 |
| PDH_3385 | AYCGGDCY | 8 | 3863 |
| PDH_3386 | AYCGGDCF | 8 | 8016 |
| PDH_3387 | EYCGGDCY | 8 | 8017 |
| PDH_3388 | TYCGGDCF | 8 | 8018 |
| PDH_3389 | LYCGGDCF | 8 | 8019 |
| PDH_3390 | AYCGGDCS | 8 | 8020 |
| PDH_3391 | QYCGGDCF | 8 | 8021 |
| PDH_3392 | QYCGGDCS | 8 | 8022 |
| PDH_3393 | KYCGGDCF | 8 | 8023 |
| PDH_3394 | KYCGGDCY | 8 | 8024 |
| PDH_3395 | QYCGGDCY | 8 | 8025 |
| PDH_3396 | KYCGGDCS | 8 | 8026 |
| PDH_3397 | VYCGGDCF | 8 | 8027 |
| PDH_3398 | IYCGGDCF | 8 | 8028 |
| PDH_3399 | IYCGGDCY | 8 | 8029 |
| PDH_3400 | IYCGGDCS | 8 | 8030 |
| PDH_3401 | PYCGGDCS | 8 | 8031 |
| PDH_3402 | PYCGGDCF | 8 | 8032 |
| PDH_3403 | TYCGGDCY | 8 | 8033 |
| PDH_3404 | EYCGGDCF | 8 | 8034 |
| PDH_3405 | PYCGGDCY | 8 | 8035 |
| PDH_3406 | TYCGGDCS | 8 | 8036 |
| PDH_3407 | DYDSSGYS | 8 | 8037 |
| PDH_3408 | YYDSSGYF | 8 | 8038 |
| PDH_3409 | LYDSSGYS | 8 | 8039 |
| PDH_3410 | AYDSSGYS | 8 | 8040 |
| PDH_3411 | AYDSSGYY | 8 | 8041 |
| PDH_3412 | NYDSSGYY | 8 | 8042 |
| PDH_3413 | IYDSSGYS | 8 | 8043 |
| PDH_3414 | FYDSSGYF | 8 | 8044 |
| PDH_3415 | DYDSSGYY | 8 | 8045 |
| PDH_3416 | YYDSSGYS | 8 | 8046 |
| PDH_3417 | TYDSSGYY | 8 | 8047 |
| PDH_3418 | TYDSSGYS | 8 | 8048 |
| PDH_3419 | PYDSSGYF | 8 | 8049 |
| PDH_3420 | IYDSSGYY | 8 | 8050 |
| PDH_3421 | IYDSSGYF | 8 | 8051 |
| PDH_3422 | YYDSSGYY | 8 | 4165 |
| PDH_3423 | NYDSSGYS | 8 | 8052 |
| PDH_3424 | NYDSSGYF | 8 | 8053 |
| PDH_3425 | VYDSSGYY | 8 | 8054 |
| PDH_3426 | VYDSSGYF | 8 | 8055 |
| PDH_3427 | FYDSSGYY | 8 | 8056 |
| PDH_3428 | FYDSSGYS | 8 | 8057 |
| PDH_3429 | SYDSSGYY | 8 | 8058 |
| PDH_3430 | SYDSSGYS | 8 | 8059 |
| PDH_3431 | PYDSSGYS | 8 | 8060 |
| PDH_3432 | PYDSSGYY | 8 | 8061 |
| PDH_3433 | LYDSSGYY | 8 | 8062 |
| PDH_3434 | VYDSSGYS | 8 | 8063 |
| PDH_3435 | SYDSSGYF | 8 | 8064 |
| PDH_3436 | LYDSSGYF | 8 | 8065 |
| PDH_3437 | HYDSSGYY | 8 | 8066 |
| PDH_3438 | HYDSSGYS | 8 | 8067 |
| PDH_3439 | TYDSSGYF | 8 | 8068 |
| PDH_3440 | AYDSSGYF | 8 | 8069 |
| PDH_3441 | DYDSSGYF | 8 | 8070 |
| PDH_3442 | HYDSSGYF | 8 | 8071 |
| PDH_3443 | RYYGSGSY | 8 | 8072 |
| PDH_3444 | RYYGSGSS | 8 | 8073 |
| PDH_3445 | GYYGSGSS | 8 | 8074 |
| PDH_3446 | GYYGSGSY | 8 | 8075 |
| PDH_3447 | FDFWSGYS | 8 | 8076 |
| PDH_3448 | HDFWSGYF | 8 | 8077 |
| PDH_3449 | FDFWSGYY | 8 | 8078 |
| PDH_3450 | SDFWSGYS | 8 | 8079 |
| PDH_3451 | SDFWSGYY | 8 | 8080 |
| PDH_3452 | PDFWSGYS | 8 | 8081 |
| PDH_3453 | HDFWSGYS | 8 | 8082 |
| PDH_3454 | IDFWSGYY | 8 | 8083 |
| PDH_3455 | HDFWSGYY | 8 | 8084 |
| PDH_3456 | NDFWSGYF | 8 | 8085 |
| PDH_3457 | YDFWSGYS | 8 | 8086 |
| PDH_3458 | IDFWSGYS | 8 | 8087 |
| PDH_3459 | PDFWSGYY | 8 | 8088 |
| PDH_3460 | SDFWSGYF | 8 | 8089 |
| PDH_3461 | VDFWSGYS | 8 | 8090 |
| PDH_3462 | IDFWSGYF | 8 | 8091 |
| PDH_3463 | YDFWSGYY | 8 | 4246 |
| PDH_3464 | YDFWSGYF | 8 | 8092 |
| PDH_3465 | TDFWSGYY | 8 | 8093 |
| PDH_3466 | DDFWSGYS | 8 | 8094 |
| PDH_3467 | LDFWSGYS | 8 | 8095 |
| PDH_3468 | DDFWSGYY | 8 | 8096 |
| PDH_3469 | DDFWSGYF | 8 | 8097 |
| PDH_3470 | VDFWSGYY | 8 | 8098 |
| PDH_3471 | VDFWSGYF | 8 | 8099 |
| PDH_3472 | NDFWSGYY | 8 | 8100 |
| PDH_3473 | FDFWSGYF | 8 | 8101 |
| PDH_3474 | NDFWSGYS | 8 | 8102 |
| PDH_3475 | LDFWSGYY | 8 | 8103 |
| PDH_3476 | ADFWSGYY | 8 | 8104 |
| PDH_3477 | ADFWSGYS | 8 | 8105 |
| PDH_3478 | TDFWSGYS | 8 | 8106 |
| PDH_3479 | TDFWSGYF | 8 | 8107 |
| PDH_3480 | ADFWSGYF | 8 | 8108 |
| PDH_3481 | LDFWSGYF | 8 | 8109 |
| PDH_3482 | PDFWSGYF | 8 | 8110 |
| PDH_3483 | LLRYFDWY | 8 | 8111 |
| PDH_3484 | QLRYFDWY | 8 | 8112 |
| PDH_3485 | PLRYFDWL | 8 | 8113 |
| PDH_3486 | ILRYFDWF | 8 | 8114 |
| PDH_3487 | ILRYFDWY | 8 | 8115 |
| PDH_3488 | ALRYFDWL | 8 | 8116 |
| PDH_3489 | QLRYFDWF | 8 | 8117 |
| PDH_3490 | KLRYFDWL | 8 | 8118 |
| PDH_3491 | TLRYFDWL | 8 | 8119 |
| PDH_3492 | TLRYFDWH | 8 | 8120 |
| PDH_3493 | ELRYFDWL | 8 | 8121 |
| PDH_3494 | ELRYFDWH | 8 | 8122 |
| PDH_3495 | PLRYFDWH | 8 | 8123 |
| PDH_3496 | ELRYFDWY | 8 | 8124 |
| PDH_3497 | ELRYFDWF | 8 | 8125 |
| PDH_3498 | LLRYFDWL | 8 | 8126 |
| PDH_3499 | VLRYFDWF | 8 | 8127 |
| PDH_3500 | TLRYFDWF | 8 | 8128 |
| PDH_3501 | ALRYFDWF | 8 | 8129 |
| PDH_3502 | ILRYFDWH | 8 | 8130 |
| PDH_3503 | QLRYFDWL | 8 | 8131 |
| PDH_3504 | QLRYFDWH | 8 | 8132 |
| PDH_3505 | VLRYFDWY | 8 | 8133 |
| PDH_3506 | TLRYFDWY | 8 | 8134 |
| PDH_3507 | ILRYFDWL | 8 | 8135 |
| PDH_3508 | LLRYFDWH | 8 | 8136 |
| PDH_3509 | VLRYFDWH | 8 | 8137 |
| PDH_3510 | KLRYFDWY | 8 | 8138 |
| PDH_3511 | KLRYFDWF | 8 | 8139 |
| PDH_3512 | ALRYFDWH | 8 | 8140 |
| PDH_3513 | ALRYFDWY | 8 | 8141 |
| PDH_3514 | VLRYFDWL | 8 | 4298 |
| PDH_3515 | KLRYFDWH | 8 | 8142 |
| PDH_3516 | PLRYFDWY | 8 | 8143 |
| PDH_3517 | PLRYFDWF | 8 | 8144 |
| PDH_3518 | LLRYFDWF | 8 | 8145 |
| PDH_3519 | IYYDSSGYS | 9 | 8146 |
| PDH_3520 | TYYDSSGYS | 9 | 8147 |
| PDH_3521 | HYYDSSGYY | 9 | 8148 |
| PDH_3522 | TYYDSSGYY | 9 | 8149 |
| PDH_3523 | HYYDSSGYS | 9 | 8150 |
| PDH_3524 | NYYDSSGYF | 9 | 8151 |
| PDH_3525 | AYYDSSGYS | 9 | 8152 |
| PDH_3526 | DYYDSSGYF | 9 | 8153 |
| PDH_3527 | DYYDSSGYS | 9 | 8154 |
| PDH_3528 | LYYDSSGYS | 9 | 8155 |
| PDH_3529 | NYYDSSGYS | 9 | 8156 |
| PDH_3530 | HYYDSSGYF | 9 | 8157 |
| PDH_3531 | DYYDSSGYY | 9 | 8158 |
| PDH_3532 | LYYDSSGYY | 9 | 8159 |
| PDH_3533 | IYYDSSGYY | 9 | 8160 |
| PDH_3534 | LYYDSSGYF | 9 | 8161 |
| PDH_3535 | IYYDSSGYF | 9 | 8162 |
| PDH_3536 | AYYDSSGYF | 9 | 8163 |
| PDH_3537 | AYYDSSGYY | 9 | 8164 |
| PDH_3538 | FYYDSSGYS | 9 | 8165 |
| PDH_3539 | YYYDSSGYS | 9 | 8166 |
| PDH_3540 | FYYDSSGYY | 9 | 8167 |
| PDH_3541 | FYYDSSGYF | 9 | 8168 |
| PDH_3542 | YYYDSSGYY | 9 | 4162 |
| PDH_3543 | YYYDSSGYF | 9 | 8169 |
| PDH_3544 | VYYDSSGYF | 9 | 8170 |
| PDH_3545 | PYYDSSGYY | 9 | 8171 |
| PDH_3546 | PYYDSSGYS | 9 | 8172 |
| PDH_3547 | VYYDSSGYS | 9 | 8173 |
| PDH_3548 | SYYDSSGYY | 9 | 8174 |
| PDH_3549 | NYYDSSGYY | 9 | 8175 |
| PDH_3550 | VYYDSSGYY | 9 | 8176 |
| PDH_3551 | SYYDSSGYS | 9 | 8177 |
| PDH_3552 | SYYDSSGYF | 9 | 8178 |
| PDH_3553 | TYYDSSGYF | 9 | 8179 |
| PDH_3554 | PYYDSSGYF | 9 | 8180 |
| PDH_3555 | PYCSGGSCF | 9 | 8181 |
| PDH_3556 | TYCSGGSCF | 9 | 8182 |
| PDH_3557 | IYCSGGSCF | 9 | 8183 |
| PDH_3558 | VYCSGGSCS | 9 | 8184 |
| PDH_3559 | TYCSGGSCY | 9 | 8185 |
| PDH_3560 | VYCSGGSCF | 9 | 8186 |
| PDH_3561 | TYCSGGSCS | 9 | 8187 |
| PDH_3562 | GYCSGGSCS | 9 | 8188 |
| PDH_3563 | IYCSGGSCS | 9 | 8189 |
| PDH_3564 | GYCSGGSCY | 9 | 3768 |
| PDH_3565 | IYCSGGSCY | 9 | 8190 |
| PDH_3566 | VYCSGGSCY | 9 | 8191 |
| PDH_3567 | AYCSGGSCF | 9 | 8192 |
| PDH_3568 | GYCSGGSCF | 9 | 8193 |
| PDH_3569 | LYCSGGSCF | 9 | 8194 |
| PDH_3570 | RYCSGGSCF | 9 | 8195 |
| PDH_3571 | LYCSGGSCS | 9 | 8196 |
| PDH_3572 | RYCSGGSCY | 9 | 8197 |
| PDH_3573 | AYCSGGSCS | 9 | 8198 |
| PDH_3574 | SYCSGGSCY | 9 | 8199 |
| PDH_3575 | SYCSGGSCF | 9 | 8200 |
| PDH_3576 | AYCSGGSCY | 9 | 8201 |
| PDH_3577 | SYCSGGSCS | 9 | 8202 |
| PDH_3578 | PYCSGGSCS | 9 | 8203 |
| PDH_3579 | LYCSGGSCY | 9 | 8204 |
| PDH_3580 | RYCSGGSCS | 9 | 8205 |
| PDH_3581 | PYCSGGSCY | 9 | 8206 |
| PDH_3582 | TYCSSTSCY | 9 | 8207 |
| PDH_3583 | AYCSSTSCY | 9 | 8208 |
| PDH_3584 | AYCSSTSCS | 9 | 8209 |
| PDH_3585 | RYCSSTSCS | 9 | 8210 |
| PDH_3586 | TYCSSTSCS | 9 | 8211 |
| PDH_3587 | PYCSSTSCY | 9 | 8212 |
| PDH_3588 | PYCSSTSCS | 9 | 8213 |
| PDH_3589 | RYCSSTSCY | 9 | 8214 |
| PDH_3590 | VYCSSTSCS | 9 | 8215 |
| PDH_3591 | VYCSSTSCY | 9 | 8216 |
| PDH_3592 | LYCSSTSCF | 9 | 8217 |
| PDH_3593 | LYCSSTSCY | 9 | 8218 |
| PDH_3594 | PYCSSTSCF | 9 | 8219 |
| PDH_3595 | VYCSSTSCF | 9 | 8220 |
| PDH_3596 | IYCSSTSCY | 9 | 8221 |
| PDH_3597 | IYCSSTSCS | 9 | 8222 |
| PDH_3598 | IYCSSTSCF | 9 | 8223 |
| PDH_3599 | SYCSSTSCS | 9 | 8224 |
| PDH_3600 | LYCSSTSCS | 9 | 8225 |
| PDH_3601 | SYCSSTSCY | 9 | 8226 |
| PDH_3602 | SYCSSTSCF | 9 | 8227 |
| PDH_3603 | GYCSSTSCY | 9 | 3807 |
| PDH_3604 | GYCSSTSCF | 9 | 8228 |
| PDH_3605 | GYCSSTSCS | 9 | 8229 |
| PDH_3606 | RYCSSTSCF | 9 | 8230 |
| PDH_3607 | TYCSSTSCF | 9 | 8231 |
| PDH_3608 | AYCSSTSCF | 9 | 8232 |
| PDH_3609 | IYDFWSGYY | 9 | 8233 |
| PDH_3610 | NYDFWSGYY | 9 | 8234 |
| PDH_3611 | PYDFWSGYF | 9 | 8235 |
| PDH_3612 | SYDFWSGYF | 9 | 8236 |
| PDH_3613 | VYDFWSGYF | 9 | 8237 |
| PDH_3614 | VYDFWSGYY | 9 | 8238 |
| PDH_3615 | HYDFWSGYY | 9 | 8239 |
| PDH_3616 | HYDFWSGYF | 9 | 8240 |
| PDH_3617 | HYDFWSGYS | 9 | 8241 |
| PDH_3618 | IYDFWSGYS | 9 | 8242 |
| PDH_3619 | NYDFWSGYS | 9 | 8243 |
| PDH_3620 | AYDFWSGYS | 9 | 8244 |
| PDH_3621 | SYDFWSGYS | 9 | 8245 |
| PDH_3622 | PYDFWSGYS | 9 | 8246 |
| PDH_3623 | AYDFWSGYY | 9 | 8247 |
| PDH_3624 | SYDFWSGYY | 9 | 8248 |
| PDH_3625 | PYDFWSGYY | 9 | 8249 |
| PDH_3626 | FYDFWSGYY | 9 | 8250 |
| PDH_3627 | FYDFWSGYF | 9 | 8251 |
| PDH_3628 | DYDFWSGYS | 9 | 8252 |
| PDH_3629 | FYDFWSGYS | 9 | 8253 |
| PDH_3630 | DYDFWSGYF | 9 | 8254 |
| PDH_3631 | LYDFWSGYY | 9 | 8255 |
| PDH_3632 | AYDFWSGYF | 9 | 8256 |
| PDH_3633 | LYDFWSGYS | 9 | 8257 |
| PDH_3634 | DYDFWSGYY | 9 | 8258 |
| PDH_3635 | LYDFWSGYF | 9 | 8259 |
| PDH_3636 | YYDFWSGYY | 9 | 4243 |
| PDH_3637 | TYDFWSGYY | 9 | 8260 |
| PDH_3638 | TYDFWSGYF | 9 | 8261 |
| PDH_3639 | YYDFWSGYS | 9 | 8262 |
| PDH_3640 | YYDFWSGYF | 9 | 8263 |
| PDH_3641 | TYDFWSGYS | 9 | 8264 |
| PDH_3642 | VYDFWSGYS | 9 | 8265 |
| PDH_3643 | NYDFWSGYF | 9 | 8266 |
| PDH_3644 | IYDFWSGYF | 9 | 8267 |
| PDH_3645 | FCSGGSCYS | 9 | 8268 |
| PDH_3646 | LCSGGSCYS | 9 | 8269 |
| PDH_3647 | VCSGGSCYS | 9 | 8270 |
| PDH_3648 | ACSGGSCYS | 9 | 8271 |
| PDH_3649 | ACSGGSCYY | 9 | 8272 |
| PDH_3650 | FCSGGSCYY | 9 | 8273 |
| PDH_3651 | LCSGGSCYF | 9 | 8274 |
| PDH_3652 | LCSGGSCYY | 9 | 8275 |
| PDH_3653 | VCSGGSCYY | 9 | 8276 |
| PDH_3654 | YCSGGSCYS | 9 | 3769 |
| PDH_3655 | PCSGGSCYS | 9 | 8277 |
| PDH_3656 | PCSGGSCYY | 9 | 8278 |
| PDH_3657 | PCSGGSCYF | 9 | 8279 |
| PDH_3658 | YCSGGSCYF | 9 | 8280 |
| PDH_3659 | YCSGGSCYY | 9 | 8281 |
| PDH_3660 | SCSGGSCYY | 9 | 8282 |
| PDH_3661 | HCSGGSCYF | 9 | 8283 |
| PDH_3662 | DCSGGSCYY | 9 | 8284 |
| PDH_3663 | SCSGGSCYF | 9 | 8285 |
| PDH_3664 | DCSGGSCYS | 9 | 8286 |
| PDH_3665 | HCSGGSCYS | 9 | 8287 |
| PDH_3666 | SCSGGSCYS | 9 | 8288 |
| PDH_3667 | FCSGGSCYF | 9 | 8289 |
| PDH_3668 | ACSGGSCYF | 9 | 8290 |
| PDH_3669 | DCSGGSCYF | 9 | 8291 |
| PDH_3670 | HCSGGSCYY | 9 | 8292 |
| PDH_3671 | VCSGGSCYF | 9 | 8293 |
| PDH_3672 | FYYDSSGYYY | 10 | 8294 |
| PDH_3673 | YYYDSSGYYF | 10 | 8295 |
| PDH_3674 | PYYDSSGYYY | 10 | 8296 |
| PDH_3675 | VYYDSSGYYS | 10 | 8297 |
| PDH_3676 | PYYDSSGYYS | 10 | 8298 |
| PDH_3677 | FYYDSSGYYS | 10 | 8299 |
| PDH_3678 | NYYDSSGYYY | 10 | 8300 |
| PDH_3679 | NYYDSSGYYS | 10 | 8301 |
| PDH_3680 | DYYDSSGYYS | 10 | 8302 |
| PDH_3681 | HYYDSSGYYF | 10 | 8303 |
| PDH_3682 | DYYDSSGYYY | 10 | 8304 |
| PDH_3683 | NYYDSSGYYF | 10 | 8305 |
| PDH_3684 | HYYDSSGYYY | 10 | 8306 |
| PDH_3685 | LYYDSSGYYF | 10 | 8307 |
| PDH_3686 | IYYDSSGYYS | 10 | 8308 |
| PDH_3687 | YYYDSSGYYS | 10 | 8309 |
| PDH_3688 | IYYDSSGYYF | 10 | 8310 |
| PDH_3689 | YYYDSSGYYY | 10 | 4161 |
| PDH_3690 | HYYDSSGYYS | 10 | 8311 |
| PDH_3691 | TYYDSSGYYS | 10 | 8312 |
| PDH_3692 | IYYDSSGYYY | 10 | 8313 |
| PDH_3693 | TYYDSSGYYF | 10 | 8314 |
| PDH_3694 | LYYDSSGYYS | 10 | 8315 |
| PDH_3695 | TYYDSSGYYY | 10 | 8316 |
| PDH_3696 | LYYDSSGYYY | 10 | 8317 |
| PDH_3697 | AYYDSSGYYF | 10 | 8318 |
| PDH_3698 | FYYDSSGYYF | 10 | 8319 |
| PDH_3699 | AYYDSSGYYY | 10 | 8320 |
| PDH_3700 | VYYDSSGYYY | 10 | 8321 |
| PDH_3701 | SYYDSSGYYF | 10 | 8322 |
| PDH_3702 | PYYDSSGYYF | 10 | 8323 |
| PDH_3703 | SYYDSSGYYY | 10 | 8324 |
| PDH_3704 | AYYDSSGYYS | 10 | 8325 |
| PDH_3705 | DYYDSSGYYF | 10 | 8326 |
| PDH_3706 | SYYDSSGYYS | 10 | 8327 |
| PDH_3707 | VYYDSSGYYF | 10 | 8328 |
| PDH_3708 | IYDYVWGSYAS | 11 | 8329 |
| PDH_3709 | AYDYVWGSYAS | 11 | 8330 |
| PDH_3710 | IYDYVWGSYAY | 11 | 8331 |
| PDH_3711 | NYDYVWGSYAY | 11 | 8332 |
| PDH_3712 | NYDYVWGSYAS | 11 | 8333 |
| PDH_3713 | YYDYVWGSYAF | 11 | 8334 |
| PDH_3714 | DYDYVWGSYAF | 11 | 8335 |
| PDH_3715 | SYDYVWGSYAY | 11 | 8336 |
| PDH_3716 | DYDYVWGSYAS | 11 | 8337 |
| PDH_3717 | DYDYVWGSYAY | 11 | 8338 |
| PDH_3718 | FYDYVWGSYAS | 11 | 8339 |
| PDH_3719 | NYDYVWGSYAF | 11 | 8340 |
| PDH_3720 | YYDYVWGSYAS | 11 | 8341 |
| PDH_3721 | FYDYVWGSYAY | 11 | 8342 |
| PDH_3722 | SYDYVWGSYAS | 11 | 8343 |
| PDH_3723 | PYDYVWGSYAF | 11 | 8344 |
| PDH_3724 | TYDYVWGSYAY | 11 | 8345 |
| PDH_3725 | VYDYVWGSYAY | 11 | 8346 |
| PDH_3726 | SYDYVWGSYAF | 11 | 8347 |
| PDH_3727 | FYDYVWGSYAF | 11 | 8348 |
| PDH_3728 | HYDYVWGSYAS | 11 | 8349 |
| PDH_3729 | VYDYVWGSYAS | 11 | 8350 |
| PDH_3730 | VYDYVWGSYAF | 11 | 8351 |
| PDH_3731 | YYDYVWGSYAY | 11 | 4071 |
| PDH_3732 | AYDYVWGSYAY | 11 | 8352 |
| PDH_3733 | LYDYVWGSYAS | 11 | 8353 |
| PDH_3734 | TYDYVWGSYAF | 11 | 8354 |
| PDH_3735 | AYDYVWGSYAF | 11 | 8355 |
| PDH_3736 | HYDYVWGSYAY | 11 | 8356 |
| PDH_3737 | TYDYVWGSYAS | 11 | 8357 |
| PDH_3738 | LYDYVWGSYAF | 11 | 8358 |
| PDH_3739 | PYDYVWGSYAY | 11 | 8359 |
| PDH_3740 | PYDYVWGSYAS | 11 | 8360 |
| PDH_3741 | HYDYVWGSYAF | 11 | 8361 |
| PDH_3742 | LYDYVWGSYAY | 11 | 8362 |
| PDH_3743 | IYDYVWGSYAF | 11 | 8363 |
| PDH_3744 | NYDYVWGSYAYT | 12 | 8364 |
| PDH_3745 | NYDYVWGSYAYI | 12 | 8365 |
| PDH_3746 | IYDYVWGSYAYI | 12 | 8366 |
| PDH_3747 | YYDYVWGSYAYK | 12 | 8367 |
| PDH_3748 | NYDYVWGSYAYK | 12 | 8368 |
| PDH_3749 | YYDYVWGSYAYT | 12 | 4070 |
| PDH_3750 | PYDYVWGSYAYT | 12 | 8369 |
| PDH_3751 | DYDYVWGSYAYI | 12 | 8370 |
| PDH_3752 | PYDYVWGSYAYK | 12 | 8371 |
| PDH_3753 | FYDYVWGSYAYI | 12 | 8372 |
| PDH_3754 | VYDYVWGSYAYT | 12 | 8373 |
| PDH_3755 | DYDYVWGSYAYK | 12 | 8374 |
| PDH_3756 | IYDYVWGSYAYT | 12 | 8375 |
| PDH_3757 | IYDYVWGSYAYK | 12 | 8376 |
| PDH_3758 | LYDYVWGSYAYI | 12 | 8377 |
| PDH_3759 | HYDYVWGSYAYK | 12 | 8378 |
| PDH_3760 | TYDYVWGSYAYI | 12 | 8379 |
| PDH_3761 | HYDYVWGSYAYT | 12 | 8380 |
| PDH_3762 | AYDYVWGSYAYT | 12 | 8381 |
| PDH_3763 | AYDYVWGSYAYK | 12 | 8382 |
| PDH_3764 | AYDYVWGSYAYI | 12 | 8383 |
| PDH_3765 | TYDYVWGSYAYK | 12 | 8384 |
| PDH_3766 | DYDYVWGSYAYT | 12 | 8385 |
| PDH_3767 | VYDYVWGSYAYK | 12 | 8386 |
| PDH_3768 | TYDYVWGSYAYT | 12 | 8387 |
| PDH_3769 | FYDYVWGSYAYK | 12 | 8388 |
| PDH_3770 | LYDYVWGSYAYK | 12 | 8389 |
| PDH_3771 | VYDYVWGSYAYI | 12 | 8390 |
| PDH_3772 | LYDYVWGSYAYT | 12 | 8391 |
| PDH_3773 | PYDYVWGSYAYI | 12 | 8392 |
| PDH_3774 | FYDYVWGSYAYT | 12 | 8393 |
| PDH_3775 | YYDYVWGSYAYI | 12 | 8394 |
| PDH_3776 | SYDYVWGSYAYI | 12 | 8395 |
| PDH_3777 | HYDYVWGSYAYI | 12 | 8396 |
| PDH_3778 | SYDYVWGSYAYT | 12 | 8397 |
| PDH_3779 | SYDYVWGSYAYK | 12 | 8398 |

TABLE 29
Theoretical segment pool of oligonucleotide
sequences encoding N2 segments of Example 14.

| | Degenerate | Peptide | | SEQ ID |
|---|---|---|---|---|
| Name | Oligo | Length | | NO |
| N2_000 | | 0 | Not degenerate | n/a |
| N2_001 | GCT | 1 | Not degenerate | n/a |
| N2_002 | GAT | 1 | Not degenerate | n/a |
| N2_003 | GAG | 1 | Not degenerate | n/a |
| N2_004 | TTT | 1 | Not degenerate | n/a |
| N2_005 | GGC | 1 | Not degenerate | n/a |
| N2_006 | CAT | 1 | Not degenerate | n/a |
| N2_007 | ATC | 1 | Not degenerate | n/a |
| N2_008 | AAA | 1 | Not degenerate | n/a |
| N2_009 | TTG | 1 | Not degenerate | n/a |
| N2_010 | ATG | 1 | Not degenerate | n/a |
| N2_011 | CCT | 1 | Not degenerate | n/a |
| N2_012 | CAA | 1 | Not degenerate | n/a |
| N2_013 | AGG | 1 | Not degenerate | n/a |
| N2_014 | TCA | 1 | Not degenerate | n/a |
| N2_015 | ACC | 1 | Not degenerate | n/a |
| N2_016 | GTT | 1 | Not degenerate | n/a |
| N2_017 | TGG | 1 | Not degenerate | n/a |
| N2_018 | TAC | 1 | Not degenerate | n/a |
| N2_019 | GMCKHT | 2 | | n/a |
| N2_020 | GMCSVT | 2 | | n/a |
| N2_021 | GMCSHT | 2 | | n/a |
| N2_022 | GMCSVG | 2 | | n/a |
| N2_023 | GMTDYT | 2 | | n/a |
| N2_024 | KHCGAS | 2 | | n/a |
| N2_025 | KHCGRC | 2 | | n/a |
| N2_026 | KHCGWG | 2 | | n/a |
| N2_027 | KHTTTM | 2 | | n/a |
| N2_028 | KHTTYC | 2 | | n/a |
| N2_029 | KHTTWC | 2 | | n/a |
| N2_030 | KHCRGA | 2 | | n/a |
| N2_031 | KHCKGG | 2 | | n/a |
| N2_032 | KHCCWC | 2 | | n/a |
| N2_033 | KHCCMT | 2 | | n/a |
| N2_034 | KHCMCA | 2 | | n/a |
| N2_035 | GVCSWG | 2 | | n/a |
| N2_036 | GVCMKC | 2 | | n/a |
| N2_037 | GVCWSG | 2 | | n/a |
| N2_038 | SVCYAC | 2 | | n/a |
| N2_039 | GNAAHA | 2 | | n/a |
| N2_040 | BYCSAG | 2 | | n/a |
| N2_041 | RBAAWA | 2 | | n/a |
| N2_042 | RBAAYA | 2 | | n/a |
| N2_043 | SBAMAA | 2 | | n/a |
| N2_044 | VSCMAA | 2 | | n/a |
| N2_045 | GRARVG | 2 | | n/a |
| N2_046 | GRADYT | 2 | | n/a |
| N2_047 | GRABYT | 2 | | n/a |
| N2_048 | GRAKBG | 2 | | n/a |
| N2_049 | RDAGMT | 2 | | n/a |
| N2_050 | RDAGAK | 2 | | n/a |
| N2_051 | RDAGRT | 2 | | n/a |
| N2_052 | RDAGWG | 2 | | n/a |
| N2_053 | RDARGG | 2 | | n/a |
| N2_054 | RDACYA | 2 | | n/a |
| N2_055 | SDACSA | 2 | | n/a |
| N2_056 | VWACYA | 2 | | n/a |
| N2_057 | VWATYA | 2 | | n/a |
| N2_058 | VWAASA | 2 | | n/a |
| N2_059 | YHCGMC | 2 | | n/a |
| N2_060 | YHCGMG | 2 | | n/a |
| N2_061 | YHCGST | 2 | | n/a |
| N2_062 | YHCSCG | 2 | | n/a |
| N2_063 | YHCKCG | 2 | | n/a |
| N2_064 | YHCSAC | 2 | | n/a |
| N2_065 | YHCKAC | 2 | | n/a |
| N2_066 | YHCRGA | 2 | | n/a |
| N2_067 | YHCCWC | 2 | | n/a |
| N2_068 | YHCMCA | 2 | | n/a |
| N2_069 | WTCYHT | 2 | | n/a |
| N2_070 | HYCGWG | 2 | | n/a |
| N2_071 | HYCTTM | 2 | | n/a |
| N2_072 | HYCAGM | 2 | | n/a |
| N2_073 | HYCTMC | 2 | | n/a |
| N2_074 | VKCTWT | 2 | | n/a |
| N2_075 | CNCVGC | 2 | | n/a |
| N2_076 | MHAGAK | 2 | | n/a |
| N2_077 | MHAGRC | 2 | | n/a |
| N2_078 | MHAGWG | 2 | | n/a |
| N2_079 | MHAMCA | 2 | | n/a |
| N2_080 | ANAGBT | 2 | | n/a |
| N2_081 | MBCYAC | 2 | | n/a |
| N2_082 | MBCAWA | 2 | | n/a |
| N2_083 | MHGGKA | 2 | | n/a |
| N2_084 | CNABTT | 2 | | n/a |
| N2_085 | CVACNA | 2 | | n/a |
| N2_086 | CVAYSG | 2 | | n/a |
| N2_087 | MSCAHG | 2 | | n/a |
| N2_088 | CRAKBG | 2 | | n/a |
| N2_089 | WSGHCA | 2 | | n/a |
| N2_090 | WGGKHC | 2 | | n/a |
| N2_091 | MBCATR | 2 | | n/a |
| N2_092 | AYABSG | 2 | | n/a |
| N2_093 | VYCAWG | 2 | | n/a |
| N2_094 | BGGSAK | 2 | | n/a |
| N2_095 | AHGRYT | 2 | | n/a |
| N2_096 | BWCAMA | 2 | | n/a |
| N2_097 | BHCTGG | 2 | | n/a |
| N2_098 | TGGBHC | 2 | | n/a |
| N2_099 | TGGVBT | 2 | | n/a |
| N2_100 | NHCGCAGCC | 3 | | n/a |
| N2_101 | BHCGGAATG | 3 | | n/a |
| N2_102 | BHCGGAGGA | 3 | | n/a |
| N2_103 | BHCGGAGTA | 3 | | n/a |
| N2_104 | VNCGCAGGA | 3 | | n/a |
| N2_105 | VBCGGAGCC | 3 | | n/a |
| N2_106 | VBCGGAGGA | 3 | | n/a |
| N2_107 | VBCGGACTA | 3 | | n/a |
| N2_108 | VBCGGAAGG | 3 | | n/a |
| N2_109 | VBCGGAAGC | 3 | | n/a |
| N2_110 | VBCGGAGTA | 3 | | n/a |
| N2_111 | VNCCTTGGA | 3 | | n/a |
| N2_112 | VNCCCAGGA | 3 | | n/a |
| N2_113 | VNCCCACCA | 3 | | n/a |
| N2_114 | VNCAGAGGA | 3 | | n/a |
| N2_115 | VNCAGCGGA | 3 | | n/a |
| N2_116 | VBCACAGGA | 3 | | n/a |
| N2_117 | VNCGTAGGA | 3 | | n/a |
| N2_118 | BHCGGACAC | 3 | | n/a |
| N2_119 | NHCAAACAA | 3 | | n/a |
| N2_120 | NHCAAAAGA | 3 | | n/a |
| N2_121 | BHCACACAA | 3 | | n/a |
| N2_122 | VNCTTTGAG | 3 | | n/a |
| N2_123 | VNCCCACTA | 3 | | n/a |
| N2_124 | VNCCCATAC | 3 | | n/a |
| N2_125 | BHCGGAGAG | 3 | | n/a |
| N2_126 | BHCGGACTA | 3 | | n/a |
| N2_127 | BHCGGATGG | 3 | | n/a |
| N2_128 | BHCGGATAC | 3 | | n/a |
| N2_129 | NHCAGAGGA | 3 | | n/a |
| N2_130 | NHCAGCGAG | 3 | | n/a |
| N2_131 | NHCAGCTGG | 3 | | n/a |
| N2_132 | VHAGGAGGA | 3 | | n/a |
| N2_133 | BHCGGAAGG | 3 | | n/a |
| N2_134 | NHCCAAGGA | 3 | | n/a |
| N2_135 | BHCACAGCT | 3 | | n/a |
| N2_136 | GGABHCGGATAC | 4 | | 8399 |
| N2_137 | AGABHCGGATAC | 4 | | 8400 |
| N2_138 | AGCBHCGGATAC | 4 | | 8401 |
| N2_139 | CCABHCGGATAC | 4 | | 8402 |
| N2_140 | GGTAGAVHGTAC | 4 | | 8403 |
| N2_141 | AGGAGAVHGTAC | 4 | | 8404 |
| N2_142 | GGABHCGGATGG | 4 | | 8405 |
| N2_143 | GGABHCGGACTA | 4 | | 8406 |
| N2_144 | GGABHCACAGCT | 4 | | 8407 |
| N2_145 | GGABHCACACAA | 4 | | 8408 |

TABLE 30
Theoretical segment pool of unique N2 polypeptide
segments encoded by the oligonucleotides of
Table 29.

| Name | Sequence | Length | SEQ ID NO |
|---|---|---|---|
| PN2_000 | | 0 | #N/A |
| PN2_001 | A | 1 | #N/A |
| PN2_002 | D | 1 | #N/A |
| PN2_003 | E | 1 | #N/A |
| PN2_004 | F | 1 | #N/A |
| PN2_005 | G | 1 | #N/A |
| PN2_006 | H | 1 | #N/A |
| PN2_007 | I | 1 | #N/A |
| PN2_008 | K | 1 | #N/A |
| PN2_009 | L | 1 | #N/A |
| PN2_010 | M | 1 | #N/A |
| PN2_011 | P | 1 | #N/A |
| PN2_012 | Q | 1 | #N/A |
| PN2_013 | R | 1 | #N/A |
| PN2_014 | S | 1 | #N/A |
| PN2_015 | T | 1 | #N/A |
| PN2_016 | V | 1 | #N/A |
| PN2_017 | W | 1 | #N/A |
| PN2_018 | Y | 1 | #N/A |
| PN2_019 | GW | 2 | #N/A |
| PN2_020 | GV | 2 | #N/A |
| PN2_021 | GT | 2 | #N/A |
| PN2_022 | GS | 2 | #N/A |
| PN2_023 | GR | 2 | #N/A |
| PN2_024 | GQ | 2 | #N/A |
| PN2_025 | GP | 2 | #N/A |
| PN2_026 | GY | 2 | #N/A |
| PN2_027 | GG | 2 | #N/A |
| PN2_028 | GF | 2 | #N/A |
| PN2_029 | GE | 2 | #N/A |
| PN2_030 | GD | 2 | #N/A |
| PN2_031 | GA | 2 | #N/A |
| PN2_032 | GL | 2 | #N/A |
| PN2_033 | GK | 2 | #N/A |
| PN2_034 | GI | 2 | #N/A |
| PN2_035 | GH | 2 | #N/A |
| PN2_036 | MG | 2 | #N/A |
| PN2_037 | MA | 2 | #N/A |
| PN2_038 | MI | 2 | #N/A |
| PN2_039 | MT | 2 | #N/A |
| PN2_040 | MV | 2 | #N/A |
| PN2_041 | FP | 2 | #N/A |
| PN2_042 | FQ | 2 | #N/A |
| PN2_043 | FR | 2 | #N/A |
| PN2_044 | FS | 2 | #N/A |
| PN2_045 | FT | 2 | #N/A |
| PN2_046 | FV | 2 | #N/A |
| PN2_047 | FW | 2 | #N/A |
| PN2_048 | FY | 2 | #N/A |
| PN2_049 | FA | 2 | #N/A |
| PN2_050 | FD | 2 | #N/A |
| PN2_051 | FE | 2 | #N/A |
| PN2_052 | FF | 2 | #N/A |
| PN2_053 | FG | 2 | #N/A |
| PN2_054 | FH | 2 | #N/A |
| PN2_055 | FK | 2 | #N/A |
| PN2_056 | FL | 2 | #N/A |
| PN2_057 | SY | 2 | #N/A |
| PN2_058 | SS | 2 | #N/A |
| PN2_059 | SR | 2 | #N/A |
| PN2_060 | SQ | 2 | #N/A |
| PN2_061 | SP | 2 | #N/A |
| PN2_062 | SW | 2 | #N/A |
| PN2_063 | SV | 2 | #N/A |
| PN2_064 | ST | 2 | #N/A |
| PN2_065 | SK | 2 | #N/A |
| PN2_066 | SI | 2 | #N/A |
| PN2_067 | SH | 2 | #N/A |
| PN2_068 | SM | 2 | #N/A |
| PN2_069 | SL | 2 | #N/A |
| PN2_070 | SA | 2 | #N/A |
| PN2_071 | SG | 2 | #N/A |
| PN2_072 | SF | 2 | #N/A |
| PN2_073 | SE | 2 | #N/A |
| PN2_074 | SD | 2 | #N/A |
| PN2_075 | YH | 2 | #N/A |
| PN2_076 | YK | 2 | #N/A |
| PN2_077 | YL | 2 | #N/A |
| PN2_078 | YA | 2 | #N/A |
| PN2_079 | YE | 2 | #N/A |
| PN2_080 | YD | 2 | #N/A |
| PN2_081 | YG | 2 | #N/A |
| PN2_082 | YF | 2 | #N/A |
| PN2_083 | YY | 2 | #N/A |
| PN2_084 | YP | 2 | #N/A |
| PN2_085 | YS | 2 | #N/A |
| PN2_086 | YR | 2 | #N/A |
| PN2_087 | YT | 2 | #N/A |
| PN2_088 | YW | 2 | #N/A |
| PN2_089 | YV | 2 | #N/A |
| PN2_090 | LF | 2 | #N/A |
| PN2_091 | LD | 2 | #N/A |
| PN2_092 | LE | 2 | #N/A |
| PN2_093 | LL | 2 | #N/A |
| PN2_094 | LM | 2 | #N/A |
| PN2_095 | LK | 2 | #N/A |
| PN2_096 | LH | 2 | #N/A |
| PN2_097 | LI | 2 | #N/A |
| PN2_098 | LW | 2 | #N/A |
| PN2_099 | LT | 2 | #N/A |
| PN2_100 | LR | 2 | #N/A |
| PN2_101 | LS | 2 | #N/A |
| PN2_102 | LP | 2 | #N/A |
| PN2_103 | LQ | 2 | #N/A |
| PN2_104 | LY | 2 | #N/A |
| PN2_105 | LG | 2 | #N/A |
| PN2_106 | LA | 2 | #N/A |
| PN2_107 | RT | 2 | #N/A |
| PN2_108 | RV | 2 | #N/A |
| PN2_109 | RW | 2 | #N/A |
| PN2_110 | RP | 2 | #N/A |
| PN2_111 | RQ | 2 | #N/A |
| PN2_112 | RR | 2 | #N/A |
| PN2_113 | RS | 2 | #N/A |
| PN2_114 | RY | 2 | #N/A |
| PN2_115 | RD | 2 | #N/A |
| PN2_116 | RE | 2 | #N/A |
| PN2_117 | RF | 2 | #N/A |
| PN2_118 | RG | 2 | #N/A |
| PN2_119 | RA | 2 | #N/A |
| PN2_120 | RL | 2 | #N/A |
| PN2_121 | RM | 2 | #N/A |
| PN2_122 | RH | 2 | #N/A |
| PN2_123 | RI | 2 | #N/A |
| PN2_124 | RK | 2 | #N/A |
| PN2_125 | LV | 2 | #N/A |
| PN2_126 | IP | 2 | #N/A |
| PN2_127 | EL | 2 | #N/A |
| PN2_128 | VK | 2 | #N/A |
| PN2_129 | EI | 2 | #N/A |
| PN2_130 | EK | 2 | #N/A |
| PN2_131 | EE | 2 | #N/A |
| PN2_132 | ED | 2 | #N/A |
| PN2_133 | EG | 2 | #N/A |
| PN2_134 | EF | 2 | #N/A |
| PN2_135 | EA | 2 | #N/A |
| PN2_136 | IT | 2 | #N/A |
| PN2_137 | ET | 2 | #N/A |
| PN2_138 | EW | 2 | #N/A |
| PN2_139 | EV | 2 | #N/A |
| PN2_140 | EP | 2 | #N/A |
| PN2_141 | ES | 2 | #N/A |
| PN2_142 | ER | 2 | #N/A |
| PN2_143 | II | 2 | #N/A |
| PN2_144 | IH | 2 | #N/A |
| PN2_145 | VR | 2 | #N/A |
| PN2_146 | VT | 2 | #N/A |
| PN2_147 | KA | 2 | #N/A |
| PN2_148 | KG | 2 | #N/A |
| PN2_149 | KE | 2 | #N/A |
| PN2_150 | KD | 2 | #N/A |
| PN2_151 | KI | 2 | #N/A |
| PN2_152 | KL | 2 | #N/A |
| PN2_153 | KS | 2 | #N/A |
| PN2_154 | KR | 2 | #N/A |
| PN2_155 | KP | 2 | #N/A |
| PN2_156 | KV | 2 | #N/A |
| PN2_157 | KT | 2 | #N/A |
| PN2_158 | DK | 2 | #N/A |
| PN2_159 | DH | 2 | #N/A |
| PN2_160 | DI | 2 | #N/A |
| PN2_161 | DF | 2 | #N/A |
| PN2_162 | DG | 2 | #N/A |
| PN2_163 | DD | 2 | #N/A |
| PN2_164 | DE | 2 | #N/A |
| PN2_165 | DA | 2 | #N/A |
| PN2_166 | DY | 2 | #N/A |
| PN2_167 | DV | 2 | #N/A |
| PN2_168 | DW | 2 | #N/A |
| PN2_169 | DT | 2 | #N/A |
| PN2_170 | DR | 2 | #N/A |
| PN2_171 | DS | 2 | #N/A |
| PN2_172 | DP | 2 | #N/A |
| PN2_173 | DQ | 2 | #N/A |
| PN2_174 | QQ | 2 | #N/A |
| PN2_175 | QP | 2 | #N/A |
| PN2_176 | QS | 2 | #N/A |
| PN2_177 | QR | 2 | #N/A |
| PN2_178 | QT | 2 | #N/A |
| PN2_179 | QW | 2 | #N/A |
| PN2_180 | QA | 2 | #N/A |
| PN2_181 | QE | 2 | #N/A |
| PN2_182 | QD | 2 | #N/A |
| PN2_183 | QG | 2 | #N/A |
| PN2_184 | QF | 2 | #N/A |
| PN2_185 | QL | 2 | #N/A |
| PN2_186 | WG | 2 | #N/A |
| PN2_187 | WF | 2 | #N/A |
| PN2_188 | WE | 2 | #N/A |
| PN2_189 | WD | 2 | #N/A |
| PN2_190 | WA | 2 | #N/A |
| PN2_191 | WL | 2 | #N/A |
| PN2_192 | WI | 2 | #N/A |
| PN2_193 | WH | 2 | #N/A |
| PN2_194 | WV | 2 | #N/A |
| PN2_195 | WT | 2 | #N/A |
| PN2_196 | WS | 2 | #N/A |
| PN2_197 | WR | 2 | #N/A |
| PN2_198 | WQ | 2 | #N/A |
| PN2_199 | WP | 2 | #N/A |
| PN2_200 | WY | 2 | #N/A |
| PN2_201 | PR | 2 | #N/A |
| PN2_202 | PS | 2 | #N/A |
| PN2_203 | PP | 2 | #N/A |
| PN2_204 | PQ | 2 | #N/A |
| PN2_205 | PV | 2 | #N/A |
| PN2_206 | PW | 2 | #N/A |
| PN2_207 | PT | 2 | #N/A |
| PN2_208 | PY | 2 | #N/A |
| PN2_209 | PA | 2 | #N/A |
| PN2_210 | PF | 2 | #N/A |
| PN2_211 | PG | 2 | #N/A |
| PN2_212 | PD | 2 | #N/A |
| PN2_213 | PE | 2 | #N/A |
| PN2_214 | PK | 2 | #N/A |
| PN2_215 | PH | 2 | #N/A |
| PN2_216 | PI | 2 | #N/A |
| PN2_217 | PL | 2 | #N/A |
| PN2_218 | PM | 2 | #N/A |
| PN2_219 | DL | 2 | #N/A |
| PN2_220 | IY | 2 | #N/A |
| PN2_221 | VA | 2 | #N/A |
| PN2_222 | VD | 2 | #N/A |
| PN2_223 | VE | 2 | #N/A |
| PN2_224 | VF | 2 | #N/A |
| PN2_225 | VG | 2 | #N/A |
| PN2_226 | VH | 2 | #N/A |
| PN2_227 | VI | 2 | #N/A |
| PN2_228 | IS | 2 | #N/A |
| PN2_229 | IR | 2 | #N/A |
| PN2_230 | VL | 2 | #N/A |
| PN2_231 | VM | 2 | #N/A |
| PN2_232 | IW | 2 | #N/A |
| PN2_233 | IV | 2 | #N/A |
| PN2_234 | VP | 2 | #N/A |
| PN2_235 | VQ | 2 | #N/A |
| PN2_236 | IK | 2 | #N/A |
| PN2_237 | VS | 2 | #N/A |
| PN2_238 | IM | 2 | #N/A |
| PN2_239 | IL | 2 | #N/A |
| PN2_240 | VV | 2 | #N/A |
| PN2_241 | VW | 2 | #N/A |
| PN2_242 | IA | 2 | #N/A |
| PN2_243 | VY | 2 | #N/A |
| PN2_244 | IE | 2 | #N/A |
| PN2_245 | ID | 2 | #N/A |
| PN2_246 | IG | 2 | #N/A |
| PN2_247 | IF | 2 | #N/A |
| PN2_248 | TQ | 2 | #N/A |
| PN2_249 | TF | 2 | #N/A |
| PN2_250 | HY | 2 | #N/A |
| PN2_251 | HR | 2 | #N/A |
| PN2_252 | HS | 2 | #N/A |
| PN2_253 | HP | 2 | #N/A |
| PN2_254 | HW | 2 | #N/A |
| PN2_255 | HT | 2 | #N/A |
| PN2_256 | HK | 2 | #N/A |
| PN2_257 | HH | 2 | #N/A |
| PN2_258 | HL | 2 | #N/A |
| PN2_259 | HA | 2 | #N/A |
| PN2_260 | HG | 2 | #N/A |
| PN2_261 | HD | 2 | #N/A |
| PN2_262 | HE | 2 | #N/A |
| PN2_263 | QV | 2 | #N/A |
| PN2_264 | TY | 2 | #N/A |
| PN2_265 | TV | 2 | #N/A |
| PN2_266 | TW | 2 | #N/A |
| PN2_267 | TT | 2 | #N/A |
| PN2_268 | TR | 2 | #N/A |
| PN2_269 | TS | 2 | #N/A |
| PN2_270 | TP | 2 | #N/A |
| PN2_271 | TL | 2 | #N/A |
| PN2_272 | TM | 2 | #N/A |
| PN2_273 | TK | 2 | #N/A |
| PN2_274 | TH | 2 | #N/A |
| PN2_275 | TI | 2 | #N/A |
| PN2_276 | TG | 2 | #N/A |
| PN2_277 | TD | 2 | #N/A |
| PN2_278 | TE | 2 | #N/A |
| PN2_279 | TA | 2 | #N/A |
| PN2_280 | AA | 2 | #N/A |
| PN2_281 | AE | 2 | #N/A |
| PN2_282 | AD | 2 | #N/A |
| PN2_283 | AG | 2 | #N/A |
| PN2_284 | AF | 2 | #N/A |
| PN2_285 | AI | 2 | #N/A |
| PN2_286 | AH | 2 | #N/A |
| PN2_287 | AK | 2 | #N/A |
| PN2_288 | AM | 2 | #N/A |
| PN2_289 | AL | 2 | #N/A |
| PN2_290 | AQ | 2 | #N/A |
| PN2_291 | AP | 2 | #N/A |
| PN2_292 | AS | 2 | #N/A |
| PN2_293 | AR | 2 | #N/A |
| PN2_294 | AT | 2 | #N/A |
| PN2_295 | AW | 2 | #N/A |
| PN2_296 | AV | 2 | #N/A |
| PN2_297 | AY | 2 | #N/A |
| PN2_298 | AGM | 3 | #N/A |
| PN2_299 | AGL | 3 | #N/A |
| PN2_300 | AGH | 3 | #N/A |
| PN2_301 | AGG | 3 | #N/A |
| PN2_302 | AGE | 3 | #N/A |
| PN2_303 | AGA | 3 | #N/A |
| PN2_304 | TQG | 3 | #N/A |
| PN2_305 | AGY | 3 | #N/A |
| PN2_306 | AGW | 3 | #N/A |
| PN2_307 | AGV | 3 | #N/A |
| PN2_308 | AGS | 3 | #N/A |
| PN2_309 | AGR | 3 | #N/A |
| PN2_310 | SPY | 3 | #N/A |
| PN2_311 | SPP | 3 | #N/A |
| PN2_312 | TAG | 3 | #N/A |
| PN2_313 | SPL | 3 | #N/A |
| PN2_314 | TAA | 3 | #N/A |
| PN2_315 | SPG | 3 | #N/A |
| PN2_316 | VAA | 3 | #N/A |
| PN2_317 | VAG | 3 | #N/A |
| PN2_318 | NPL | 3 | #N/A |
| PN2_319 | PAA | 3 | #N/A |
| PN2_320 | NPG | 3 | #N/A |
| PN2_321 | LAG | 3 | #N/A |
| PN2_322 | LAA | 3 | #N/A |
| PN2_323 | NPY | 3 | #N/A |
| PN2_324 | ALG | 3 | #N/A |
| PN2_325 | RLG | 3 | #N/A |
| PN2_326 | TSG | 3 | #N/A |
| PN2_327 | DTA | 3 | #N/A |
| PN2_328 | PAG | 3 | #N/A |
| PN2_329 | QGG | 3 | #N/A |
| PN2_330 | DLG | 3 | #N/A |
| PN2_331 | DTQ | 3 | #N/A |
| PN2_332 | LSG | 3 | #N/A |
| PN2_333 | LSE | 3 | #N/A |
| PN2_334 | PGR | 3 | #N/A |
| PN2_335 | VLG | 3 | #N/A |
| PN2_336 | LSW | 3 | #N/A |
| PN2_337 | AFE | 3 | #N/A |
| PN2_338 | TTG | 3 | #N/A |
| PN2_339 | FTQ | 3 | #N/A |
| PN2_340 | IGV | 3 | #N/A |
| PN2_341 | NFE | 3 | #N/A |
| PN2_342 | IGS | 3 | #N/A |
| PN2_343 | IGR | 3 | #N/A |
| PN2_344 | PGS | 3 | #N/A |
| PN2_345 | IGG | 3 | #N/A |
| PN2_346 | GRG | 3 | #N/A |
| PN2_347 | IGA | 3 | #N/A |
| PN2_348 | DSG | 3 | #N/A |
| PN2_349 | IGL | 3 | #N/A |
| PN2_350 | HLG | 3 | #N/A |
| PN2_351 | HPP | 3 | #N/A |
| PN2_352 | AKQ | 3 | #N/A |
| PN2_353 | GLG | 3 | #N/A |
| PN2_354 | LFE | 3 | #N/A |
| PN2_355 | GGV | 3 | #N/A |
| PN2_356 | GGS | 3 | #N/A |
| PN2_357 | GGR | 3 | #N/A |
| PN2_358 | GGG | 3 | #N/A |
| PN2_359 | GGA | 3 | #N/A |
| PN2_360 | GGL | 3 | #N/A |
| PN2_361 | YTA | 3 | #N/A |
| PN2_362 | LTQ | 3 | #N/A |
| PN2_363 | FQG | 3 | #N/A |
| PN2_364 | LVG | 3 | #N/A |
| PN2_365 | LTA | 3 | #N/A |
| PN2_366 | LTG | 3 | #N/A |
| PN2_367 | DPY | 3 | #N/A |
| PN2_368 | DFE | 3 | #N/A |
| PN2_369 | DPG | 3 | #N/A |
| PN2_370 | HTA | 3 | #N/A |
| PN2_371 | DPP | 3 | #N/A |
| PN2_372 | PGG | 3 | #N/A |
| PN2_373 | VPP | 3 | #N/A |
| PN2_374 | PGA | 3 | #N/A |
| PN2_375 | VPY | 3 | #N/A |
| PN2_376 | PGV | 3 | #N/A |
| PN2_377 | VPL | 3 | #N/A |
| PN2_378 | STG | 3 | #N/A |
| PN2_379 | STA | 3 | #N/A |
| PN2_380 | HGV | 3 | #N/A |
| PN2_381 | HGW | 3 | #N/A |
| PN2_382 | HGR | 3 | #N/A |
| PN2_383 | HGL | 3 | #N/A |
| PN2_384 | HGM | 3 | #N/A |
| PN2_385 | STQ | 3 | #N/A |
| PN2_386 | HGH | 3 | #N/A |
| PN2_387 | HGG | 3 | #N/A |
| PN2_388 | DSW | 3 | #N/A |
| PN2_389 | HGE | 3 | #N/A |
| PN2_390 | TFE | 3 | #N/A |
| PN2_391 | PGY | 3 | #N/A |
| PN2_392 | PGL | 3 | #N/A |
| PN2_393 | PGM | 3 | #N/A |
| PN2_394 | DKR | 3 | #N/A |
| PN2_395 | DKQ | 3 | #N/A |
| PN2_396 | VFE | 3 | #N/A |
| PN2_397 | PRG | 3 | #N/A |
| PN2_398 | PGH | 3 | #N/A |
| PN2_399 | PPL | 3 | #N/A |
| PN2_400 | EGG | 3 | #N/A |
| PN2_401 | RAG | 3 | #N/A |
| PN2_402 | SAA | 3 | #N/A |
| PN2_403 | FGW | 3 | #N/A |
| PN2_404 | SAG | 3 | #N/A |
| PN2_405 | FGR | 3 | #N/A |
| PN2_406 | FGH | 3 | #N/A |
| PN2_407 | FGG | 3 | #N/A |
| PN2_408 | TPG | 3 | #N/A |
| PN2_409 | LPY | 3 | #N/A |
| PN2_410 | TPL | 3 | #N/A |
| PN2_411 | LPP | 3 | #N/A |
| PN2_412 | LPL | 3 | #N/A |
| PN2_413 | TPP | 3 | #N/A |
| PN2_414 | LPG | 3 | #N/A |
| PN2_415 | HRG | 3 | #N/A |
| PN2_416 | TPY | 3 | #N/A |
| PN2_417 | APY | 3 | #N/A |
| PN2_418 | IPG | 3 | #N/A |
| PN2_419 | APP | 3 | #N/A |
| PN2_420 | PQG | 3 | #N/A |
| PN2_421 | IPL | 3 | #N/A |
| PN2_422 | IPP | 3 | #N/A |
| PN2_423 | APL | 3 | #N/A |
| PN2_424 | SFE | 3 | #N/A |
| PN2_425 | APG | 3 | #N/A |
| PN2_426 | YSE | 3 | #N/A |
| PN2_427 | IFE | 3 | #N/A |
| PN2_428 | YSW | 3 | #N/A |
| PN2_429 | PKR | 3 | #N/A |
| PN2_430 | RTG | 3 | #N/A |
| PN2_431 | PKQ | 3 | #N/A |
| PN2_432 | HGY | 3 | #N/A |
| PN2_433 | TKR | 3 | #N/A |
| PN2_434 | NLG | 3 | #N/A |
| PN2_435 | VKR | 3 | #N/A |
| PN2_436 | RFE | 3 | #N/A |
| PN2_437 | SSW | 3 | #N/A |
| PN2_438 | NPP | 3 | #N/A |
| PN2_439 | SSE | 3 | #N/A |
| PN2_440 | SSG | 3 | #N/A |
| PN2_441 | YGR | 3 | #N/A |
| PN2_442 | ATG | 3 | #N/A |
| PN2_443 | ATA | 3 | #N/A |
| PN2_444 | HPL | 3 | #N/A |
| PN2_445 | ISW | 3 | #N/A |
| PN2_446 | ATQ | 3 | #N/A |
| PN2_447 | ISG | 3 | #N/A |
| PN2_448 | ISE | 3 | #N/A |
| PN2_449 | DGR | 3 | #N/A |
| PN2_450 | ASW | 3 | #N/A |
| PN2_451 | DGG | 3 | #N/A |
| PN2_452 | DGE | 3 | #N/A |
| PN2_453 | HPG | 3 | #N/A |
| PN2_454 | DGH | 3 | #N/A |
| PN2_455 | DGL | 3 | #N/A |
| PN2_456 | DGM | 3 | #N/A |
| PN2_457 | LKQ | 3 | #N/A |
| PN2_458 | DGV | 3 | #N/A |
| PN2_459 | DGW | 3 | #N/A |
| PN2_460 | PVG | 3 | #N/A |
| PN2_461 | ASG | 3 | #N/A |
| PN2_462 | IRG | 3 | #N/A |
| PN2_463 | VTA | 3 | #N/A |
| PN2_464 | TSE | 3 | #N/A |
| PN2_465 | FRG | 3 | #N/A |
| PN2_466 | ASE | 3 | #N/A |
| PN2_467 | VTG | 3 | #N/A |
| PN2_468 | GTG | 3 | #N/A |
| PN2_469 | LGW | 3 | #N/A |
| PN2_470 | VTQ | 3 | #N/A |
| PN2_471 | TLG | 3 | #N/A |
| PN2_472 | YAA | 3 | #N/A |
| PN2_473 | DGY | 3 | #N/A |
| PN2_474 | ITG | 3 | #N/A |
| PN2_475 | HVG | 3 | #N/A |
| PN2_476 | RPP | 3 | #N/A |
| PN2_477 | AAG | 3 | #N/A |
| PN2_478 | RSG | 3 | #N/A |
| PN2_479 | AAA | 3 | #N/A |
| PN2_480 | TGR | 3 | #N/A |
| PN2_481 | TGS | 3 | #N/A |
| PN2_482 | TGV | 3 | #N/A |
| PN2_483 | RPY | 3 | #N/A |
| PN2_484 | TGA | 3 | #N/A |
| PN2_485 | TGG | 3 | #N/A |
| PN2_486 | RPG | 3 | #N/A |
| PN2_487 | RPL | 3 | #N/A |
| PN2_488 | TGL | 3 | #N/A |
| PN2_489 | FKQ | 3 | #N/A |
| PN2_490 | FKR | 3 | #N/A |
| PN2_491 | SLG | 3 | #N/A |
| PN2_492 | LGM | 3 | #N/A |
| PN2_493 | LGA | 3 | #N/A |
| PN2_494 | NRG | 3 | #N/A |
| PN2_495 | LGG | 3 | #N/A |
| PN2_496 | LGE | 3 | #N/A |
| PN2_497 | LGY | 3 | #N/A |
| PN2_498 | LGR | 3 | #N/A |
| PN2_499 | LGS | 3 | #N/A |
| PN2_500 | LGV | 3 | #N/A |
| PN2_501 | GFE | 3 | #N/A |
| PN2_502 | LQG | 3 | #N/A |
| PN2_503 | HSG | 3 | #N/A |
| PN2_504 | HSE | 3 | #N/A |
| PN2_505 | HSW | 3 | #N/A |
| PN2_506 | DPL | 3 | #N/A |
| PN2_507 | GPL | 3 | #N/A |
| PN2_508 | HAA | 3 | #N/A |
| PN2_509 | IAG | 3 | #N/A |
| PN2_510 | GPG | 3 | #N/A |
| PN2_511 | IAA | 3 | #N/A |
| PN2_512 | HAG | 3 | #N/A |
| PN2_513 | DQG | 3 | #N/A |
| PN2_514 | GPY | 3 | #N/A |
| PN2_515 | GPP | 3 | #N/A |
| PN2_516 | VQG | 3 | #N/A |
| PN2_517 | RGR | 3 | #N/A |
| PN2_518 | RGS | 3 | #N/A |
| PN2_519 | SKQ | 3 | #N/A |
| PN2_520 | RGV | 3 | #N/A |
| PN2_521 | SKR | 3 | #N/A |
| PN2_522 | RGA | 3 | #N/A |
| PN2_523 | RGG | 3 | #N/A |
| PN2_524 | RGL | 3 | #N/A |
| PN2_525 | VGL | 3 | #N/A |
| PN2_526 | VGM | 3 | #N/A |
| PN2_527 | VGH | 3 | #N/A |
| PN2_528 | FGY | 3 | #N/A |
| PN2_529 | VGE | 3 | #N/A |
| PN2_530 | VGG | 3 | #N/A |
| PN2_531 | VGA | 3 | #N/A |
| PN2_532 | YKR | 3 | #N/A |
| PN2_533 | YKQ | 3 | #N/A |
| PN2_534 | VGY | 3 | #N/A |
| PN2_535 | VGV | 3 | #N/A |
| PN2_536 | VGW | 3 | #N/A |
| PN2_537 | VGR | 3 | #N/A |
| PN2_538 | VGS | 3 | #N/A |
| PN2_539 | FTA | 3 | #N/A |
| PN2_540 | PSG | 3 | #N/A |
| PN2_541 | PSE | 3 | #N/A |
| PN2_542 | NVG | 3 | #N/A |
| PN2_543 | FGV | 3 | #N/A |
| PN2_544 | FGL | 3 | #N/A |
| PN2_545 | ILG | 3 | #N/A |
| PN2_546 | PGW | 3 | #N/A |
| PN2_547 | FSE | 3 | #N/A |
| PN2_548 | DVG | 3 | #N/A |
| PN2_549 | FSW | 3 | #N/A |
| PN2_550 | IKR | 3 | #N/A |
| PN2_551 | IKQ | 3 | #N/A |
| PN2_552 | DSE | 3 | #N/A |
| PN2_553 | FGM | 3 | #N/A |
| PN2_554 | VRG | 3 | #N/A |
| PN2_555 | NKQ | 3 | #N/A |
| PN2_556 | TVG | 3 | #N/A |
| PN2_557 | NQG | 3 | #N/A |
| PN2_558 | SRG | 3 | #N/A |
| PN2_559 | YRG | 3 | #N/A |
| PN2_560 | FGE | 3 | #N/A |
| PN2_561 | PLG | 3 | #N/A |
| PN2_562 | PPG | 3 | #N/A |
| PN2_563 | NSE | 3 | #N/A |
| PN2_564 | NSG | 3 | #N/A |
| PN2_565 | PPP | 3 | #N/A |
| PN2_566 | GAG | 3 | #N/A |
| PN2_567 | PPY | 3 | #N/A |
| PN2_568 | FAA | 3 | #N/A |
| PN2_569 | NSW | 3 | #N/A |
| PN2_570 | HPY | 3 | #N/A |
| PN2_571 | PSW | 3 | #N/A |
| PN2_572 | ARG | 3 | #N/A |
| PN2_573 | SGS | 3 | #N/A |
| PN2_574 | NAA | 3 | #N/A |
| PN2_575 | NAG | 3 | #N/A |
| PN2_576 | SGW | 3 | #N/A |
| PN2_577 | GSG | 3 | #N/A |
| PN2_578 | DRG | 3 | #N/A |
| PN2_579 | RVG | 3 | #N/A |
| PN2_580 | HKR | 3 | #N/A |
| PN2_581 | HKQ | 3 | #N/A |
| PN2_582 | AQG | 3 | #N/A |
| PN2_583 | VPG | 3 | #N/A |
| PN2_584 | AKR | 3 | #N/A |
| PN2_585 | VVG | 3 | #N/A |
| PN2_586 | SGL | 3 | #N/A |
| PN2_587 | VKQ | 3 | #N/A |
| PN2_588 | SVG | 3 | #N/A |
| PN2_589 | SQG | 3 | #N/A |
| PN2_590 | LKR | 3 | #N/A |
| PN2_591 | PTG | 3 | #N/A |
| PN2_592 | PGE | 3 | #N/A |
| PN2_593 | PTA | 3 | #N/A |
| PN2_594 | LLG | 3 | #N/A |
| PN2_595 | PTQ | 3 | #N/A |
| PN2_596 | TRG | 3 | #N/A |
| PN2_597 | GVG | 3 | #N/A |
| PN2_598 | IVG | 3 | #N/A |
| PN2_599 | LRG | 3 | #N/A |
| PN2_600 | HTQ | 3 | #N/A |
| PN2_601 | AVG | 3 | #N/A |
| PN2_602 | IPY | 3 | #N/A |
| PN2_603 | YQG | 3 | #N/A |
| PN2_604 | HFE | 3 | #N/A |
| PN2_605 | RRG | 3 | #N/A |
| PN2_606 | LGH | 3 | #N/A |
| PN2_607 | LGL | 3 | #N/A |
| PN2_608 | TSW | 3 | #N/A |
| PN2_609 | TKQ | 3 | #N/A |
| PN2_610 | IQG | 3 | #N/A |
| PN2_611 | HQG | 3 | #N/A |
| PN2_612 | SGY | 3 | #N/A |
| PN2_613 | DAG | 3 | #N/A |
| PN2_614 | DAA | 3 | #N/A |
| PN2_615 | SGR | 3 | #N/A |
| PN2_616 | SGV | 3 | #N/A |
| PN2_617 | SGH | 3 | #N/A |
| PN2_618 | SGM | 3 | #N/A |
| PN2_619 | SGA | 3 | #N/A |
| PN2_620 | SGE | 3 | #N/A |
| PN2_621 | SGG | 3 | #N/A |
| PN2_622 | YTQ | 3 | #N/A |
| PN2_623 | YGG | 3 | #N/A |
| PN2_624 | YGE | 3 | #N/A |
| PN2_625 | PFE | 3 | #N/A |
| PN2_626 | VSW | 3 | #N/A |
| PN2_627 | YGM | 3 | #N/A |
| PN2_628 | YGL | 3 | #N/A |
| PN2_629 | YGH | 3 | #N/A |
| PN2_630 | YGW | 3 | #N/A |
| PN2_631 | YGV | 3 | #N/A |
| PN2_632 | NKR | 3 | #N/A |
| PN2_633 | VSE | 3 | #N/A |
| PN2_634 | KGG | 3 | #N/A |
| PN2_635 | VSG | 3 | #N/A |
| PN2_636 | YGY | 3 | #N/A |
| PN2_637 | RPGY | 4 | 8409 |
| PN2_638 | SAGY | 4 | 6277 |
| PN2_639 | PSGY | 4 | 6268 |
| PN2_640 | RFGY | 4 | 8410 |
| PN2_641 | RLGY | 4 | 8411 |
| PN2_642 | PYGY | 4 | 6281 |
| PN2_643 | GREY | 4 | 8412 |
| PN2_644 | GRKY | 4 | 8413 |
| PN2_645 | GHGW | 4 | 8414 |
| PN2_646 | RVGY | 4 | 8415 |
| PN2_647 | GLGL | 4 | 8416 |
| PN2_648 | GHGY | 4 | 8417 |
| PN2_649 | RDGY | 4 | 4410 |
| PN2_650 | RRVY | 4 | 8418 |
| PN2_651 | GLGW | 4 | 8419 |
| PN2_652 | GHGL | 4 | 8420 |
| PN2_653 | GLGY | 4 | 8421 |
| PN2_654 | PVGY | 4 | 8422 |
| PN2_655 | GPGY | 4 | 8423 |
| PN2_656 | GPGW | 4 | 8424 |
| PN2_657 | PDGY | 4 | 5829 |
| PN2_658 | GPGL | 4 | 8425 |
| PN2_659 | GVTA | 4 | 8426 |
| PN2_660 | GRLY | 4 | 8427 |
| PN2_661 | RRAY | 4 | 8428 |
| PN2_662 | GHTQ | 4 | 8429 |
| PN2_663 | GVGL | 4 | 8430 |
| PN2_664 | SYGY | 4 | 4434 |
| PN2_665 | RRQY | 4 | 8431 |
| PN2_666 | GATQ | 4 | 8432 |
| PN2_667 | PFGY | 4 | 8433 |
| PN2_668 | GVGY | 4 | 8434 |
| PN2_669 | GVGW | 4 | 8435 |
| PN2_670 | RAGY | 4 | 6278 |
| PN2_671 | GATA | 4 | 8436 |
| PN2_672 | RYGY | 4 | 6262 |
| PN2_673 | GRAY | 4 | 8437 |
| PN2_674 | GRMY | 4 | 8438 |
| PN2_675 | GRTY | 4 | 8439 |
| PN2_676 | PPGY | 4 | 8440 |
| PN2_677 | RRPY | 4 | 8441 |
| PN2_678 | RHGY | 4 | 8442 |
| PN2_679 | GDGY | 4 | 5813 |
| PN2_680 | SVGY | 4 | 8443 |
| PN2_681 | GVTQ | 4 | 8444 |
| PN2_682 | GDGW | 4 | 8445 |
| PN2_683 | GRQY | 4 | 8446 |
| PN2_684 | GDGL | 4 | 8447 |
| PN2_685 | SHGY | 4 | 8448 |
| PN2_686 | GSGY | 4 | 6284 |
| PN2_687 | GFGY | 4 | 8449 |
| PN2_688 | GFGW | 4 | 8450 |
| PN2_689 | GSGW | 4 | 8451 |
| PN2_690 | GFGL | 4 | 8452 |
| PN2_691 | GSGL | 4 | 8453 |
| PN2_692 | RRLY | 4 | 8454 |
| PN2_693 | GFTA | 4 | 8455 |
| PN2_694 | PLGY | 4 | 8456 |
| PN2_695 | GYTQ | 4 | 8457 |
| PN2_696 | GLTQ | 4 | 8458 |
| PN2_697 | GHTA | 4 | 8459 |
| PN2_698 | PHGY | 4 | 8460 |
| PN2_699 | GFTQ | 4 | 8461 |
| PN2_700 | GRVY | 4 | 8462 |
| PN2_701 | GYTA | 4 | 8463 |
| PN2_702 | GLTA | 4 | 8464 |
| PN2_703 | PAGY | 4 | 6276 |
| PN2_704 | RRKY | 4 | 8465 |
| PN2_705 | SSGY | 4 | 4186 |
| PN2_706 | GPTQ | 4 | 8466 |
| PN2_707 | SDGY | 4 | 5805 |
| PN2_708 | GPTA | 4 | 8467 |
| PN2_709 | GDTQ | 4 | 8468 |
| PN2_710 | GAGW | 4 | 8469 |
| PN2_711 | GAGY | 4 | 6270 |
| PN2_712 | GDTA | 4 | 8470 |
| PN2_713 | SFGY | 4 | 8471 |
| PN2_714 | GAGL | 4 | 8472 |
| PN2_715 | GSTQ | 4 | 8473 |
| PN2_716 | GRPY | 4 | 8474 |
| PN2_717 | SLGY | 4 | 8475 |
| PN2_718 | GSTA | 4 | 8476 |
| PN2_719 | GYGL | 4 | 8477 |
| PN2_720 | RSGY | 4 | 6269 |
| PN2_721 | RREY | 4 | 8478 |
| PN2_722 | SPGY | 4 | 8479 |
| PN2_723 | GYGY | 4 | 6260 |
| PN2_724 | RRTY | 4 | 8480 |
| PN2_725 | GYGW | 4 | 8481 |
| PN2_726 | RRMY | 4 | 8482 |

TABLE 31
Theoretical segment pool of oligonucleotides encoding JH segments of Example 15.

| | | Peptide | Degen- | SEQ ID |
|---|---|---|---|---|
| Name | Degenerate Oligo | Length | erate | NO |
| JH4_001 | TGGGGACAGGGTACATTGGTCACCGTCTCCTCA | 0 | | 8483 |
| JH1_002 | CATTGGGGACAGGGTACATTGGTCACCGTCTCCTCA | 1 | | 8484 |
| JH1_003 | ATTTGGGGACAGGGTACATTGGTCACCGTCTCCTCA | 1 | | 8485 |
| JH1_004 | TACTGGGGACAGGGTACATTGGTCACCGTCTCCTCA | 1 | | 8486 |
| JH1_005 | CCATGGGGACAGGGTACATTGGTCACCGTCTCCTCA | 1 | | 8487 |
| JH1_006 | GTCTGGGGACAGGGTACATTGGTCACCGTCTCCTCA | 1 | | 8488 |
| JH1_007 | GATTGGGGACAGGGTACATTGGTCACCGTCTCCTCA | 1 | | 8489 |
| JH1_008 | TTCTGGGGACAGGGTACATTGGTCACCGTCTCCTCA | 1 | | 8490 |
| JH1_009 | AATTGGGGACAGGGTACATTGGTCACCGTCTCCTCA | 1 | | 8491 |
| JH1_010 | AGTTGGGGACAGGGTACATTGGTCACCGTCTCCTCA | 1 | | 8492 |
| JH1_011 | ACTTGGGGACAGGGTACATTGGTCACCGTCTCCTCA | 1 | | 8493 |
| JH1_200 | GCATGGGGACAGGGTACATTGGTCACCGTCTCCTCA | 1 | | 8494 |
| JH4_013 | GATTACTGGGGACAGGGTACATTGGTCACCGTCTCCTCA | 2 | | 8495 |
| JH4_016 | GCTTACTGGGGACAGGGTACATTGGTCACCGTCTCCTCA | 2 | | 8496 |
| JH4_017 | TTCTACTGGGGACAGGGTACATTGGTCACCGTCTCCTCA | 2 | | 8497 |
| JH4_018 | GGCTATTGGGGACAGGGTACATTGGTCACCGTCTCCTCA | 2 | | 8498 |
| JH4_019 | CATTACTGGGGACAGGGTACATTGGTCACCGTCTCCTCA | 2 | | 8499 |
| JH4_023 | AGTTACTGGGGACAGGGTACATTGGTCACCGTCTCCTCA | 2 | | 8500 |
| JH4_024 | GTTTATTGGGGACAGGGTACATTGGTCACCGTCTCCTCA | 2 | | 8501 |
| JH4_025 | TACTATTGGGGACAGGGTACATTGGTCACCGTCTCCTCA | 2 | | 8502 |
| JH4_022 | CSATACTGGGGACAGGGTACATTGGTCACCGTCTCCTCA | 2 | YES | 8503 |
| JH3_012 | RACATATGGGGTCAGGGTACAATGGTCACCGTCTCCTCA | 2 | YES | 8504 |
| JH5_014 | RACCCATGGGGACAGGGTACATTGGTCACCGTCTCCTCA | 2 | YES | 8505 |
| JH3_015 | RACGTATGGGGTCAGGGTACAATGGTCACCGTCTCCTCA | 2 | YES | 8506 |
| JH4_021 | AMCTACTGGGGACAGGGTACATTGGTCACCGTCTCCTCA | 2 | YES | 8507 |
| JH4_020 | MTATACTGGGGACAGGGTACATTGGTCACCGTCTCCTCA | 2 | YES | 8508 |
| JH4_029 | TTCGATTATTGGGGACAGGGTACATTGGTCACCGTCTCCTCA | 3 | | 8509 |
| JH4_030 | ATTGACTACTGGGGACAGGGTACATTGGTCACCGTCTCCTCA | 3 | | 8510 |
| JH4_031 | GTGGACTACTGGGGACAGGGTACATTGGTCACCGTCTCCTCA | 3 | | 8511 |
| JH4_032 | TTAGATTACTGGGGACAGGGTACATTGGTCACCGTCTCCTCA | 3 | | 8512 |
| JH4_033 | TCCGATTATTGGGGACAGGGTACATTGGTCACCGTCTCCTCA | 3 | | 8513 |
| JH4_034 | CACGATTACTGGGGACAGGGTACATTGGTCACCGTCTCCTCA | 3 | | 8514 |
| JH4_035 | AGAGACTACTGGGGACAGGGTACATTGGTCACCGTCTCCTCA | 3 | | 8515 |
| JH4_036 | CCAGATTACTGGGGACAGGGTACATTGGTCACCGTCTCCTCA | 3 | | 8516 |
| JH4_037 | AACGATTACTGGGGACAGGGTACATTGGTCACCGTCTCCTCA | 3 | | 8517 |
| JH4_038 | ACTGATTACTGGGGACAGGGTACATTGGTCACCGTCTCCTCA | 3 | | 8518 |
| JH4_039 | GATGATTATTGGGGACAGGGTACATTGGTCACCGTCTCCTCA | 3 | | 8519 |
| JH4_040 | GGTGATTATTGGGGACAGGGTACATTGGTCACCGTCTCCTCA | 3 | | 8520 |
| JH4_041 | GCAGACTACTGGGGACAGGGTACATTGGTCACCGTCTCCTCA | 3 | | 8521 |
| JH4_042 | TACGATTATTGGGGACAGGGTACATTGGTCACCGTCTCCTCA | 3 | | 8522 |
| JH5_043 | TTCGATCCCTGGGGACAGGGTACATTGGTCACCGTCTCCTCA | 3 | | 8523 |
| JH6_044 | ATGGATGTGTGGGGCCAGGGAACAACTGTCACCGTCTCCTCA | 3 | | 8524 |
| JH1_026 | TTMCAACACTGGGGACAGGGTACATTGGTCACCGTCTCCTCA | 3 | YES | 8525 |
| JH3_046 | STAGACGTATGGGGTCAGGGTACAATGGTCACCGTCTCCTCA | 3 | YES | 8526 |
| JH3_028 | TTMGACATATGGGGTCAGGGTACAATGGTCACCGTCTCCTCA | 3 | YES | 8527 |
| JH2_027 | TTMGACCTATGGGGGAGAGGTACCTTGGTCACCGTCTCCTCA | 3 | YES | 8528 |
| JH5_045 | TYAGACCCATGGGGACAGGGTACATTGGTCACCGTCTCCTCA | 3 | YES | 8529 |
| JH3_049 | GCCTTTGATATTTGGGGTCAGGGTACAATGGTCACCGTCTCCTCA | 4 | | 8530 |
| JH4_051 | TACTTTGACTACTGGGGACAGGGTACATTGGTCACCGTCTCCTCA | 4 | | 8531 |
| JH4_052 | AATTTCGACTACTGGGGACAGGGTACATTGGTCACCGTCTCCTCA | 4 | | 8532 |
| JH4_053 | GACTTCGACTATTGGGGACAGGGTACATTGGTCACCGTCTCCTCA | 4 | | 8533 |
| JH4_054 | CATTTCGATTACTGGGGACAGGGTACATTGGTCACCGTCTCCTCA | 4 | | 8534 |
| JH4_055 | TTCTTTGATTATTGGGGACAGGGTACATTGGTCACCGTCTCCTCA | 4 | | 8535 |
| JH4_056 | TCTTTTGATTATTGGGGACAGGGTACATTGGTCACCGTCTCCTCA | 4 | | 8536 |
| JH4_057 | AGATTCGACTACTGGGGACAGGGTACATTGGTCACCGTCTCCTCA | 4 | | 8537 |
| JH4_058 | TTGTTCGACTACTGGGGACAGGGTACATTGGTCACCGTCTCCTCA | 4 | | 8538 |
| JH4_059 | CCCTTCGACTATTGGGGACAGGGTACATTGGTCACCGTCTCCTCA | 4 | | 8539 |
| JH4_060 | ATTTTCGATTATTGGGGACAGGGTACATTGGTCACCGTCTCCTCA | 4 | | 8540 |
| JH4_061 | ACCTTTGATTACTGGGGACAGGGTACATTGGTCACCGTCTCCTCA | 4 | | 8541 |
| JH4_062 | GGATTCGATTACTGGGGACAGGGTACATTGGTCACCGTCTCCTCA | 4 | | 8542 |
| JH4_063 | GTTTTCGATTACTGGGGACAGGGTACATTGGTCACCGTCTCCTCA | 4 | | 8543 |
| JH4_064 | GCTTTTGACTACTGGGGACAGGGTACATTGGTCACCGTCTCCTCA | 4 | | 8544 |
| JH5_065 | TGGTTTGATCCATGGGGACAGGGTACATTGGTCACCGTCTCCTCA | 4 | | 8545 |
| JH6_068 | GGAATGGACGTATGGGGCCAGGGAACAACTGTCACCGTCTCCTCA | 4 | | 8546 |
| JH6_070 | YCAATGGACGTATGGGGCCAGGGAACAACTGTCACCGTCTCCTCA | 4 | YES | 8547 |
| JH6_069 | KACATGGACGTATGGGGCAAGGGTACAACTGTCACCGTCTCCTCA | 4 | YES | 8548 |
| JH3_198 | STATTCGACATATGGGGTCAGGGTACAATGGTCACCGTCTCCTCA | 4 | YES | 8549 |
| JH2_048 | KACTTCGACCTATGGGGGAGAGGTACCTTGGTCACCGTCTCCTCA | 4 | YES | 8550 |
| JH1_047 | KACTTCCAACACTGGGGACAGGGTACATTGGTCACCGTCTCCTCA | 4 | YES | 8551 |
| JH5_067 | GSATTCGACCCATGGGGACAGGGTACATTGGTCACCGTCTCCTCA | 4 | YES | 8552 |
| JH3_050 | YCATTCGACATATGGGGTCAGGGTACAATGGTCACCGTCTCCTCA | 4 | YES | 8553 |
| JH5_066 | AGMTTCGACCCATGGGGACAGGGTACATTGGTCACCGTCTCCTCA | 4 | YES | 8554 |
| JH2_072 | TGGTACTTCGACTTATGGGGGAGAGGTACCTTGGTCACCGTCTCCTCA | 5 | | 8555 |
| JH3_075 | GACGCATTTGATATATGGGGTCAGGGTACAATGGTCACCGTCTCCTCA | 5 | | 8556 |
| JH3_076 | TACGCATTTGATATTTGGGGTCAGGGTACAATGGTCACCGTCTCCTCA | 5 | | 8557 |
| JH3_077 | CACGCATTCGACATCTGGGGTCAGGGTACAATGGTCACCGTCTCCTCA | 5 | | 8558 |
| JH3_078 | TTCGCATTCGATATCTGGGGTCAGGGTACAATGGTCACCGTCTCCTCA | 5 | | 8559 |
| JH3_079 | TCAGCTTTCGACATATGGGGTCAGGGTACAATGGTCACCGTCTCCTCA | 5 | | 8560 |
| JH3_080 | AGAGCCTTCGATATATGGGGTCAGGGTACAATGGTCACCGTCTCCTCA | 5 | | 8561 |
| JH3_081 | TTAGCCTTCGATATCTGGGGTCAGGGTACAATGGTCACCGTCTCCTCA | 5 | | 8562 |
| JH3_082 | GGAGCCTTCGACATATGGGGTCAGGGTACAATGGTCACCGTCTCCTCA | 5 | | 8563 |
| JH4_086 | GACTATTTTGATTACTGGGGACAGGGTACATTGGTCACCGTCTCCTCA | 5 | | 8564 |
| JH4_087 | TATTACTTTGATTACTGGGGACAGGGTACATTGGTCACCGTCTCCTCA | 5 | | 8565 |
| JH4_088 | CACTATTTCGACTATTGGGGACAGGGTACATTGGTCACCGTCTCCTCA | 5 | | 8566 |
| JH4_089 | TTCTATTTTGATTACTGGGGACAGGGTACATTGGTCACCGTCTCCTCA | 5 | | 8567 |
| JH4_090 | AGTTATTTTGACTATTGGGGACAGGGTACATTGGTCACCGTCTCCTCA | 5 | | 8568 |
| JH4_091 | AGATACTTTGATTACTGGGGACAGGGTACATTGGTCACCGTCTCCTCA | 5 | | 8569 |
| JH4_092 | TTATATTTCGACTATTGGGGACAGGGTACATTGGTCACCGTCTCCTCA | 5 | | 8570 |
| JH4_093 | CCCTACTTTGACTATTGGGGACAGGGTACATTGGTCACCGTCTCCTCA | 5 | | 8571 |
| JH4_095 | GGATATTTCGATTATTGGGGACAGGGTACATTGGTCACCGTCTCCTCA | 5 | | 8572 |
| JH4_096 | GTTTACTTTGATTATTGGGGACAGGGTACATTGGTCACCGTCTCCTCA | 5 | | 8573 |
| JH4_097 | GCTTACTTTGATTATTGGGGACAGGGTACATTGGTCACCGTCTCCTCA | 5 | | 8574 |
| JH4_098 | AACTACTTCGATTACTGGGGACAGGGTACATTGGTCACCGTCTCCTCA | 5 | | 8575 |
| JH5_099 | AATTGGTTCGATCCTTGGGGACAGGGTACATTGGTCACCGTCTCCTCA | 5 | | 8576 |
| JH5_100 | GATTGGTTTGATCCATGGGGACAGGGTACATTGGTCACCGTCTCCTCA | 5 | | 8577 |
| JH5_101 | TATTGGTTTGATCCATGGGGACAGGGTACATTGGTCACCGTCTCCTCA | 5 | | 8578 |
| JH5_102 | CACTGGTTCGATCCATGGGGACAGGGTACATTGGTCACCGTCTCCTCA | 5 | | 8579 |
| JH5_103 | TTCTGGTTTGACCCCTGGGGACAGGGTACATTGGTCACCGTCTCCTCA | 5 | | 8580 |
| JH5_104 | TCTTGGTTTGATCCCTGGGGACAGGGTACATTGGTCACCGTCTCCTCA | 5 | | 8581 |
| JH5_105 | AGATGGTTTGATCCTTGGGGACAGGGTACATTGGTCACCGTCTCCTCA | 5 | | 8582 |
| JH5_107 | GGTTGGTTCGATCCCTGGGGACAGGGTACATTGGTCACCGTCTCCTCA | 5 | | 8583 |
| JH5_109 | GCTTGGTTTGATCCATGGGGACAGGGTACATTGGTCACCGTCTCCTCA | 5 | | 8584 |
| JH6_110 | TACGGTATGGACGTTTGGGGCCAGGGAACAACTGTCACCGTCTCCTCA | 5 | | 8585 |
| JH6_112 | GATGGGATGGATGTTTGGGGCCAGGGAACAACTGTCACCGTCTCCTCA | 5 | | 8586 |
| JH3_084 | SCAGCATTCGACATATGGGGTCAGGGTACAATGGTCACCGTCTCCTCA | 5 | YES | 8587 |
| JH5_106 | MCATGGTTCGACCCATGGGGACAGGGTACATTGGTCACCGTCTCCTCA | 5 | YES | 8588 |
| JH2_073 | RGCTACTTCGACCTATGGGGGAGAGGTACCTTGGTCACCGTCTCCTCA | 5 | YES | 8589 |
| JH4_094 | AYATACTTCGACTACTGGGGACAGGGTACATTGGTCACCGTCTCCTCA | 5 | YES | 8590 |
| JH5_108 | RTATGGTTCGACCCATGGGGACAGGGTACATTGGTCACCGTCTCCTCA | 5 | YES | 8591 |
| JH6_113 | CWCGGAATGGACGTATGGGGCCAGGGAACAACTGTCACCGTCTCCTCA | 5 | YES | 8592 |
| JH6_114 | KCAGGAATGGACGTATGGGGCCAGGGAACAACTGTCACCGTCTCCTCA | 5 | YES | 8593 |
| JH3_083 | RTAGCATTCGACATATGGGGTCAGGGTACAATGGTCACCGTCTCCTCA | 5 | YES | 8594 |
| JH1_071 | RAGTACTTCCAACACTGGGGACAGGGTACATTGGTCACCGTCTCCTCA | 5 | YES | 8595 |
| JH3_085 | AMCGCATTCGACATATGGGGTCAGGGTACAATGGTCACCGTCTCCTCA | 5 | YES | 8596 |
| JH2_074 | CKATACTTCGACCTATGGGGGAGAGGTACCTTGGTCACCGTCTCCTCA | 5 | YES | 8597 |
| JH6_111 | KACTACATGGACGTATGGGGCAAGGGTACAACTGTCACCGTCTCCTCA | 5 | YES | 8598 |
| JH2_116 | TACTGGTACTTCGATTTGTGGGGGAGAGGTACCTTGGTCACCGTCTCCTCA | 6 | | 8599 |
| JH2_117 | GATTGGTACTTCGATTTATGGGGGAGAGGTACCTTGGTCACCGTCTCCTCA | 6 | | 8600 |
| JH5_120 | GATAATTGGTTCGATCCATGGGGACAGGGTACATTGGTCACCGTCTCCTCA | 6 | | 8601 |
| JH5_121 | TATAACTGGTTCGATCCCTGGGGACAGGGTACATTGGTCACCGTCTCCTCA | 6 | | 8602 |
| JH5_122 | CACAATTGGTTCGACCCCTGGGGACAGGGTACATTGGTCACCGTCTCCTCA | 6 | | 8603 |
| JH5_123 | TTCAATTGGTTTGATCCCTGGGGACAGGGTACATTGGTCACCGTCTCCTCA | 6 | | 8604 |
| JH5_124 | AGCAACTGGTTCGACCCATGGGGACAGGGTACATTGGTCACCGTCTCCTCA | 6 | | 8605 |
| JH5_125 | AGAAACTGGTTTGATCCATGGGGACAGGGTACATTGGTCACCGTCTCCTCA | 6 | | 8606 |
| JH5_126 | TTAAATTGGTTCGACCCTTGGGGACAGGGTACATTGGTCACCGTCTCCTCA | 6 | | 8607 |
| JH5_127 | CCCAATTGGTTTGATCCATGGGGACAGGGTACATTGGTCACCGTCTCCTCA | 6 | | 8608 |
| JH5_128 | ATAAATTGGTTCGACCCTTGGGGACAGGGTACATTGGTCACCGTCTCCTCA | 6 | | 8609 |
| JH5_129 | ACTAACTGGTTTGACCCATGGGGACAGGGTACATTGGTCACCGTCTCCTCA | 6 | | 8610 |
| JH5_130 | GGTAACTGGTTTGACCCATGGGGACAGGGTACATTGGTCACCGTCTCCTCA | 6 | | 8611 |
| JH5_131 | GTGAACTGGTTTGATCCCTGGGGACAGGGTACATTGGTCACCGTCTCCTCA | 6 | | 8612 |
| JH5_132 | GCCAACTGGTTCGATCCCTGGGGACAGGGTACATTGGTCACCGTCTCCTCA | 6 | | 8613 |
| JH5_133 | AACAATTGGTTCGACCCATGGGGACAGGGTACATTGGTCACCGTCTCCTCA | 6 | | 8614 |
| JH6_134 | TACTACGGCATGGATGTATGGGGCCAGGGAACAACTGTCACCGTCTCCTCA | 6 | | 8615 |
| JH6_136 | GATTATGGAATGGACGTATGGGGCCAGGGAACAACTGTCACCGTCTCCTCA | 6 | | 8616 |
| JH6_137 | TTCTACGGTATGGATGTCTGGGGCCAGGGAACAACTGTCACCGTCTCCTCA | 6 | | 8617 |
| JH6_138 | CATTACGGAATGGACGTATGGGGCCAGGGAACAACTGTCACCGTCTCCTCA | 6 | | 8618 |
| JH6_139 | TTGTACGGAATGGACGTTTGGGGCCAGGGAACAACTGTCACCGTCTCCTCA | 6 | | 8619 |
| JH6_140 | AACTATGGCATGGATGTGTGGGGCCAGGGAACAACTGTCACCGTCTCCTCA | 6 | | 8620 |
| JH2_118 | CWCTGGTACTTCGACCTATGGGGGAGAGGTACCTTGGTCACCGTCTCCTCA | 6 | YES | 8621 |
| JH6_141 | SCATACGGAATGGACGTATGGGGCCAGGGAACAACTGTCACCGTCTCCTCA | 6 | YES | 8622 |
| JH1_115 | SCAGAATACTTCCAACACTGGGGACAGGGTACATTGGTCACCGTCTCCTCA | 6 | YES | 8623 |
| JH6_135 | KACTACTACATGGACGTATGGGGCAAGGGTACAACTGTCACCGTCTCCTCA | 6 | YES | 8624 |
| JH6_199 | GKATACGGAATGGACGTATGGGGCCAGGGAACAACTGTCACCGTCTCCTCA | 6 | YES | 8625 |
| JH6_142 | AKCTACGGAATGGACGTATGGGGCCAGGGAACAACTGTCACCGTCTCCTCA | 6 | YES | 8626 |
| JH2_119 | ARCTGGTACTTCGACCTATGGGGGAGAGGTACCTTGGTCACCGTCTCCTCA | 6 | YES | 8627 |
| JH6_143 | ASATACGGAATGGACGTATGGGGCCAGGGAACAACTGTCACCGTCTCCTCA | 6 | YES | 8628 |
| JH6_144 | TATTACTATGGTATGGATGTATGGGGCCAGGGAACAACTGTCACCGTCTCCTCA | 7 | | 8629 |
| JH6_145 | TATTACTATTATATGGATGTTTGGGGCAAGGGTACAACTGTCACCGTCTCCTCA | 7 | | 8630 |
| JH6_146 | GATTACTACGGCATGGATGTTTGGGGCCAGGGAACAACTGTCACCGTCTCCTCA | 7 | | 8631 |
| JH6_148 | AACTACTACGGCATGGACGTATGGGGCCAGGGAACAACTGTCACCGTCTCCTCA | 7 | | 8632 |
| JH6_147 | CWCTACTACGGAATGGACGTATGGGGCCAGGGAACAACTGTCACCGTCTCCTCA | 7 | YES | 8633 |
| JH6_150 | RACTACTACTACATGGACGTATGGGGCAAGGGTACAACTGTCACCGTCTCCTCA | 7 | YES | 8634 |
| JH6_149 | YCATACTACGGAATGGACGTATGGGGCCAGGGAACAACTGTCACCGTCTCCTCA | 7 | YES | 8635 |
| JH6_151 | TATTACTACTACGGAATGGACGTTTGGGGCCAGGGAACAACTGTCACCGTCTCCTCA | 8 | | 8636 |
| JH6_152 | AATTATTATTACGGCATGGACGTCTGGGGCCAGGGAACAACTGTCACCGTCTCCTCA | 8 | | 8637 |
| JH6_153 | GATTACTATTACGGTATGGATGTCTGGGGCCAGGGAACAACTGTCACCGTCTCCTCA | 8 | | 8638 |
| JH6_154 | CACTATTACTACGGCATGGACGTATGGGGCCAGGGAACAACTGTCACCGTCTCCTCA | 8 | | 8639 |
| JH6_155 | TTCTATTATTATGGTATGGATGTTTGGGGCCAGGGAACAACTGTCACCGTCTCCTCA | 8 | | 8640 |
| JH6_156 | TCTTACTACTATGGGATGGACGTGTGGGGCCAGGGAACAACTGTCACCGTCTCCTCA | 8 | | 8641 |
| JH6_157 | AGATATTACTACGGCATGGATGTTTGGGGCCAGGGAACAACTGTCACCGTCTCCTCA | 8 | | 8642 |
| JH6_158 | TTATACTACTATGGGATGGATGTATGGGGCCAGGGAACAACTGTCACCGTCTCCTCA | 8 | | 8643 |
| JH6_159 | CCTTACTACTATGGCATGGACGTCTGGGGCCAGGGAACAACTGTCACCGTCTCCTCA | 8 | | 8644 |
| JH6_160 | ACCTATTACTATGGTATGGATGTGTGGGGCCAGGGAACAACTGTCACCGTCTCCTCA | 8 | | 8645 |
| JH6_161 | GGATACTACTATGGGATGGACGTCTGGGGCCAGGGAACAACTGTCACCGTCTCCTCA | 8 | | 8646 |
| JH6_163 | GCCTACTATTATGGCATGGACGTCTGGGGCCAGGGAACAACTGTCACCGTCTCCTCA | 8 | | 8647 |
| JH6_164 | TACTACTATTATTATATGGACGTTTGGGGCAAGGGTACAACTGTCACCGTCTCCTCA | 8 | | 8648 |
| JH6_165 | AACTACTACTACTATATGGATGTTTGGGGCAAGGGTACAACTGTCACCGTCTCCTCA | 8 | | 8649 |
| JH6_166 | GATTATTATTACTATATGGACGTCTGGGGCAAGGGTACAACTGTCACCGTCTCCTCA | 8 | | 8650 |
| JH6_162 | RTATACTACTACGGAATGGACGTATGGGGCCAGGGAACAACTGTCACCGTCTCCTCA | 8 | YES | 8651 |
| JH6_168 | RGCTACTACTACTACATGGACGTATGGGGCAAGGGTACAACTGTCACCGTCTCCTCA | 8 | YES | 8652 |
| JH6_167 | CMCTACTACTACTACATGGACGTATGGGGCAAGGGTACAACTGTCACCGTCTCCTCA | 8 | YES | 8653 |
| JH6_169 | TATTACTATTATTACGGGATGGACGTATGGGGCCAGGGAACAACTGTCACCGTCTCCTCA | 9 | | 8654 |
| JH6_170 | AATTATTATTATTATGGGATGGACGTATGGGGCCAGGGAACAACTGTCACCGTCTCCTCA | 9 | | 8655 |
| JH6_171 | GACTATTACTATTATGGAATGGATGTATGGGGCCAGGGAACAACTGTCACCGTCTCCTCA | 9 | | 8656 |
| JH6_172 | CATTATTATTATTACGGAATGGACGTTTGGGGCCAGGGAACAACTGTCACCGTCTCCTCA | 9 | | 8657 |
| JH6_173 | TTCTATTACTATTATGGCATGGATGTGTGGGGCCAGGGAACAACTGTCACCGTCTCCTCA | 9 | | 8658 |
| JH6_174 | AGCTACTACTATTATGGTATGGACGTGTGGGGCCAGGGAACAACTGTCACCGTCTCCTCA | 9 | | 8659 |
| JH6_175 | AGATATTACTACTATGGCATGGATGTCTGGGGCCAGGGAACAACTGTCACCGTCTCCTCA | 9 | | 8660 |
| JH6_176 | TTATACTACTATTACGGCATGGATGTCTGGGGCCAGGGAACAACTGTCACCGTCTCCTCA | 9 | | 8661 |
| JH6_177 | CCCTATTATTACTACGGAATGGACGTTTGGGGCCAGGGAACAACTGTCACCGTCTCCTCA | 9 | | 8662 |
| JH6_178 | ATCTATTACTATTATGGCATGGATGTATGGGGCCAGGGAACAACTGTCACCGTCTCCTCA | 9 | | 8663 |
| JH6_179 | ACCTATTACTACTATGGCATGGACGTTTGGGGCCAGGGAACAACTGTCACCGTCTCCTCA | 9 | | 8664 |
| JH6_180 | GGCTACTATTACTATGGGATGGACGTCTGGGGCCAGGGAACAACTGTCACCGTCTCCTCA | 9 | | 8665 |
| JH6_181 | GTCTACTATTATTATGGCATGGACGTATGGGGCCAGGGAACAACTGTCACCGTCTCCTCA | 9 | | 8666 |
| JH6_182 | GCTTACTATTACTACGGCATGGACGTATGGGGCCAGGGAACAACTGTCACCGTCTCCTCA | 9 | | 8667 |
| JH6_183 | GATTATTATTATTACTATGGTATGGATGTGTGGGGCCAGGGAACAACTGTCACCGTCTCCTCA | 10 | | 8668 |
| JH6_184 | TACTATTACTACTATTATGGCATGGACGTCTGGGGCCAGGGAACAACTGTCACCGTCTCCTCA | 10 | | 8669 |
| JH6_185 | CACTACTACTATTATTATGGGATGGACGTATGGGGCCAGGGAACAACTGTCACCGTCTCCTCA | 10 | | 8670 |
| JH6_186 | TTCTATTATTATTATTACGGAATGGACGTCTGGGGCCAGGGAACAACTGTCACCGTCTCCTCA | 10 | | 8671 |
| JH6_187 | AGCTACTATTACTACTATGGGATGGATGTGTGGGGCCAGGGAACAACTGTCACCGTCTCCTCA | 10 | | 8672 |
| JH6_188 | AGATATTACTATTACTATGGTATGGACGTTTGGGGCCAGGGAACAACTGTCACCGTCTCCTCA | 10 | | 8673 |
| JH6_189 | TTGTACTATTACTATTATGGAATGGACGTTTGGGGCCAGGGAACAACTGTCACCGTCTCCTCA | 10 | | 8674 |
| JH6_190 | CCTTACTATTATTATTATGGGATGGATGTCTGGGGCCAGGGAACAACTGTCACCGTCTCCTCA | 10 | | 8675 |
| JH6_191 | ATATATTACTATTACTACGGGATGGATGTTTGGGGCCAGGGAACAACTGTCACCGTCTCCTCA | 10 | | 8676 |
| JH6_192 | ACCTACTATTATTATTACGGGATGGACGTTTGGGGCCAGGGAACAACTGTCACCGTCTCCTCA | 10 | | 8677 |
| JH6_193 | GGTTACTATTATTACTACGGGATGGACGTGTGGGGCCAGGGAACAACTGTCACCGTCTCCTCA | 10 | | 8678 |
| JH6_194 | GTGTATTACTATTACTACGGGATGGACGTGTGGGGCCAGGGAACAACTGTCACCGTCTCCTCA | 10 | | 8679 |
| JH6_195 | GCCTATTACTACTACTATGGGATGGATGTGTGGGGCCAGGGAACAACTGTCACCGTCTCCTCA | 10 | | 8680 |
| JH6_196 | AATTATTATTACTATTACGGTATGGACGTGTGGGGCCAGGGAACAACTGTCACCGTCTCCTCA | 10 | | 8681 |
| JH6_197 | KACTACTACTACTACTACTACATGGACGTATGGGGCAAGGGTACAACTGTCACCGTCTCCTCA | 10 | YES | 8682 |

TABLE 32
Theoretical segment pool of unique H3-JH
polypeptide segments encoded by the
oligonucleotides of Table 31.

| Name | Sequence | Length | SEQ ID NO |
|---|---|---|---|
| PJH4_001 | | 0 | n/a |
| PJH1_002 | H | 1 | n/a |
| PJH1_003 | I | 1 | n/a |
| PJH1_004 | Y | 1 | n/a |
| PJH1_005 | P | 1 | n/a |
| PJH1_006 | V | 1 | n/a |
| PJH1_007 | D | 1 | n/a |
| PJH1_008 | F | 1 | n/a |
| PJH1_009 | N | 1 | n/a |
| PJH1_010 | S | 1 | n/a |
| PJH1_011 | T | 1 | n/a |
| PJH1_200 | A | 1 | n/a |
| PJH4_013 | DY | 2 | n/a |
| PJH4_016 | AY | 2 | n/a |
| PJH4_017 | FY | 2 | n/a |
| PJH4_018 | GY | 2 | n/a |
| PJH4_019 | HY | 2 | n/a |
| PJH4_023 | SY | 2 | n/a |
| PJH4_024 | VY | 2 | n/a |
| PJH4_025 | YY | 2 | n/a |
| PJH3_012A | NI | 2 | n/a |
| PJH3_012B | DI | 2 | n/a |
| PJH3_015A | NV | 2 | n/a |
| PJH3_015B | DV | 2 | n/a |
| PJH4_020A | LY | 2 | n/a |
| PJH4_020B | IY | 2 | n/a |
| PJH4_021A | NY | 2 | n/a |
| PJH4_021B | TY | 2 | n/a |
| PJH4_022A | PY | 2 | n/a |
| PJH4_022B | RY | 2 | n/a |
| PJH5_014A | NP | 2 | n/a |
| PJH5_014B | DP | 2 | n/a |
| PJH4_029 | FDY | 3 | n/a |
| PJH4_030 | IDY | 3 | n/a |
| PJH4_031 | VDY | 3 | n/a |
| PJH4_032 | LDY | 3 | n/a |
| PJH4_033 | SDY | 3 | n/a |
| PJH4_034 | HDY | 3 | n/a |
| PJH4_035 | RDY | 3 | n/a |
| PJH4_036 | PDY | 3 | n/a |
| PJH4_037 | NDY | 3 | n/a |
| PJH4_038 | TDY | 3 | n/a |
| PJH4_039 | DDY | 3 | n/a |
| PJH4_040 | GDY | 3 | n/a |
| PJH4_041 | ADY | 3 | n/a |
| PJH4_042 | YDY | 3 | n/a |
| PJH5_043 | FDP | 3 | n/a |
| PJH6_044 | MDV | 3 | n/a |
| PJH1_026A | LQH | 3 | n/a |
| PJH1_026B | FQH | 3 | n/a |
| PJH2_027A | FDL | 3 | n/a |
| PJH2_027B | LDL | 3 | n/a |
| PJH3_028A | FDI | 3 | n/a |
| PJH3_028B | LDI | 3 | n/a |
| PJH3_046A | VDV | 3 | n/a |
| PJH3_046B | LDV | 3 | n/a |
| PJH5_045A | LDP | 3 | n/a |
| PJH5_045B | SDP | 3 | n/a |
| PJH3_049 | AFDI | 4 | 4539 |
| PJH4_051 | YFDY | 4 | 4567 |
| PJH4_052 | NFDY | 4 | 4580 |
| PJH4_053 | DFDY | 4 | 4581 |
| PJH4_054 | HFDY | 4 | 4582 |
| PJH4_055 | FFDY | 4 | 4583 |
| PJH4_056 | SFDY | 4 | 4584 |
| PJH4_057 | RFDY | 4 | 4585 |
| PJH4_058 | LFDY | 4 | 4586 |
| PJH4_059 | PFDY | 4 | 4587 |
| PJH4_060 | IFDY | 4 | 4588 |
| PJH4_061 | TFDY | 4 | 4589 |
| PJH4_062 | GFDY | 4 | 4590 |
| PJH4_063 | VFDY | 4 | 4591 |
| PJH4_064 | AFDY | 4 | 4592 |
| PJH5_065 | WFDP | 4 | 4596 |
| PJH6_068 | GMDV | 4 | 4641 |
| PJH1_047A | YFQH | 4 | 4489 |
| PJH1_047B | DFQH | 4 | 4514 |
| PJH2_048A | DFDL | 4 | 4537 |
| PJH2_048B | YFDL | 4 | 4529 |
| PJH3_050A | PFDI | 4 | 4554 |
| PJH3_050B | SFDI | 4 | 4553 |
| PJH3_198A | VFDI | 4 | 4563 |
| PJH3_198B | LFDI | 4 | 4558 |
| PJH5_066A | RFDP | 4 | 4622 |
| PJH5_066B | SFDP | 4 | 4625 |
| PJH5_067A | GFDP | 4 | 4623 |
| PJH5_067B | AFDP | 4 | 4633 |
| PJH6_069A | YMDV | 4 | 4687 |
| PJH6_069B | DMDV | 4 | 8683 |
| PJH6_070A | PMDV | 4 | 8684 |
| PJH6_070B | SMDV | 4 | 8685 |
| PJH2_072 | WYFDL | 5 | 4528 |
| PJH3_075 | DAFDI | 5 | 4538 |
| PJH3_076 | YAFDI | 5 | 4540 |
| PJH3_077 | HAFDI | 5 | 4541 |
| PJH3_078 | FAFDI | 5 | 4542 |
| PJH3_079 | SAFDI | 5 | 4543 |
| PJH3_080 | RAFDI | 5 | 4544 |
| PJH3_081 | LAFDI | 5 | 4545 |
| PJH3_082 | GAFDI | 5 | 4549 |
| PJH4_086 | DYFDY | 5 | 4566 |
| PJH4_087 | YYFDY | 5 | 4568 |
| PJH4_088 | HYFDY | 5 | 4569 |
| PJH4_089 | FYFDY | 5 | 4570 |
| PJH4_090 | SYFDY | 5 | 4571 |
| PJH4_091 | RYFDY | 5 | 4572 |
| PJH4_092 | LYFDY | 5 | 4573 |
| PJH4_093 | PYFDY | 5 | 4574 |
| PJH4_095 | GYFDY | 5 | 4577 |
| PJH4_096 | VYFDY | 5 | 4578 |
| PJH4_097 | AYFDY | 5 | 4579 |
| PJH4_098 | NYFDY | 5 | 4593 |
| PJH5_099 | NWFDP | 5 | 4595 |
| PJH5_100 | DWFDP | 5 | 4609 |
| PJH5_101 | YWFDP | 5 | 4610 |
| PJH5_102 | HWFDP | 5 | 4611 |
| PJH5_103 | FWFDP | 5 | 4612 |
| PJH5_104 | SWFDP | 5 | 4613 |
| PJH5_105 | RWFDP | 5 | 4614 |
| PJH5_107 | GWFDP | 5 | 4619 |
| PJH5_109 | AWFDP | 5 | 4621 |
| PJH6_110 | YGMDV | 5 | 4640 |
| PJH6_112 | DGMDV | 5 | 8686 |
| PJH1_071A | EYFQH | 5 | 4488 |
| PJH1_071B | KYFQH | 5 | 4502 |
| PJH2_073A | SYFDL | 5 | 8687 |
| PJH2_073B | GYFDL | 5 | 4533 |
| PJH2_074A | RYFDL | 5 | 4534 |
| PJH2_074B | LYFDL | 5 | 8688 |
| PJH3_083A | IAFDI | 5 | 4547 |
| PJH3_083B | VAFDI | 5 | 4550 |
| PJH3_084A | PAFDI | 5 | 4546 |
| PJH3_084B | AAFDI | 5 | 4551 |
| PJH3_085A | NAFDI | 5 | 4565 |
| PJH3_085B | TAFDI | 5 | 4548 |
| PJH4_094A | IYFDY | 5 | 4575 |
| PJH4_094B | TYFDY | 5 | 4576 |
| PJH5_106A | PWFDP | 5 | 4616 |
| PJH5_106B | TWFDP | 5 | 4618 |
| PJH5_108A | IWFDP | 5 | 4617 |
| PJH5_108B | VWFDP | 5 | 4620 |
| PJH6_111A | YYMDV | 5 | 4686 |
| PJH6_111B | DYMDV | 5 | 8689 |
| PJH6_113A | HGMDV | 5 | 8690 |
| PJH6_113B | LGMDV | 5 | 8691 |
| PJH6_114A | SGMDV | 5 | 8692 |
| PJH6_114B | AGMDV | 5 | 8693 |
| PJH2_116 | YWYFDL | 6 | 4527 |
| PJH2_117 | DWYFDL | 6 | 4530 |
| PJH5_120 | DNWFDP | 6 | 4594 |
| PJH5_121 | YNWFDP | 6 | 4597 |
| PJH5_122 | HNWFDP | 6 | 4598 |
| PJH5_123 | FNWFDP | 6 | 4599 |
| PJH5_124 | SNWFDP | 6 | 4600 |
| PJH5_125 | RNWFDP | 6 | 4601 |
| PJH5_126 | LNWFDP | 6 | 4602 |
| PJH5_127 | PNWFDP | 6 | 4603 |
| PJH5_128 | INWFDP | 6 | 4604 |
| PJH5_129 | TNWFDP | 6 | 4605 |
| PJH5_130 | GNWFDP | 6 | 4606 |
| PJH5_131 | VNWFDP | 6 | 4607 |
| PJH5_132 | ANWFDP | 6 | 4608 |
| PJH5_133 | NNWFDP | 6 | 4634 |
| PJH6_134 | YYGMDV | 6 | 4639 |
| PJH6_136 | DYGMDV | 6 | 8694 |
| PJH6_137 | FYGMDV | 6 | 8695 |
| PJH6_138 | HYGMDV | 6 | 8696 |
| PJH6_139 | LYGMDV | 6 | 8697 |
| PJH6_140 | NYGMDV | 6 | 8698 |
| PJH1_115A | AEYFQH | 6 | 4526 |
| PJH1_115B | PEYFQH | 6 | 4491 |
| PJH2_118A | LWYFDL | 6 | 8699 |
| PJH2_118B | HWYFDL | 6 | 4531 |
| PJH2_119A | NWYFDL | 6 | 4532 |
| PJH2_119B | SWYFDL | 6 | 8700 |
| PJH6_135A | DYYMDV | 6 | 8701 |
| PJH6_135B | YYYMDV | 6 | 4685 |
| PJH6_141A | AYGMDV | 6 | 8702 |
| PJH6_141B | PYGMDV | 6 | 8703 |
| PJH6_142A | SYGMDV | 6 | 8704 |
| PJH6_142B | IYGMDV | 6 | 8705 |
| PJH6_143A | TYGMDV | 6 | 8706 |
| PJH6_143B | RYGMDV | 6 | 8707 |
| PJH6_199A | GYGMDV | 6 | 8708 |
| PJH6_199B | VYGMDV | 6 | 8709 |
| PJH6_144 | YYYGMDV | 7 | 4638 |
| PJH6_145 | YYYYMDV | 7 | 4684 |
| PJH6_146 | DYYGMDV | 7 | 8710 |
| PJH6_148 | NYYGMDV | 7 | 8711 |
| PJH6_147A | LYYGMDV | 7 | 8712 |
| PJH6_147B | HYYGMDV | 7 | 8713 |
| PJH6_149A | SYYGMDV | 7 | 8714 |
| PJH6_149B | PYYGMDV | 7 | 8715 |
| PJH6_150A | NYYYMDV | 7 | 8716 |
| PJH6_150B | DYYYMDV | 7 | 8717 |
| PJH6_151 | YYYYGMDV | 8 | 4637 |
| PJH6_152 | NYYYGMDV | 8 | 4667 |
| PJH6_153 | DYYYGMDV | 8 | 4668 |
| PJH6_154 | HYYYGMDV | 8 | 4669 |
| PJH6_155 | FYYYGMDV | 8 | 4670 |
| PJH6_156 | SYYYGMDV | 8 | 4671 |
| PJH6_157 | RYYYGMDV | 8 | 4672 |
| PJH6_158 | LYYYGMDV | 8 | 4673 |
| PJH6_159 | PYYYGMDV | 8 | 4674 |
| PJH6_160 | TYYYGMDV | 8 | 4676 |
| PJH6_161 | GYYYGMDV | 8 | 4677 |
| PJH6_163 | AYYYGMDV | 8 | 4679 |
| PJH6_164 | YYYYYMDV | 8 | 4683 |
| PJH6_165 | NYYYYMDV | 8 | 4713 |
| PJH6_166 | DYYYYMDV | 8 | 4714 |
| PJH6_162A | VYYYGMDV | 8 | 4678 |
| PJH6_162B | IYYYGMDV | 8 | 4675 |
| PJH6_167A | HYYYYMDV | 8 | 4715 |
| PJH6_167B | PYYYYMDV | 8 | 4720 |
| PJH6_168A | SYYYYMDV | 8 | 4717 |
| PJH6_168B | GYYYYMDV | 8 | 4723 |
| PJH6_169 | YYYYYGMDV | 9 | 4636 |
| PJH6_170 | NYYYYGMDV | 9 | 4654 |
| PJH6_171 | DYYYYGMDV | 9 | 4655 |
| PJH6_172 | HYYYYGMDV | 9 | 4656 |
| PJH6_173 | FYYYYGMDV | 9 | 4657 |
| PJH6_174 | SYYYYGMDV | 9 | 4658 |
| PJH6_175 | RYYYYGMDV | 9 | 4659 |
| PJH6_176 | LYYYYGMDV | 9 | 4660 |
| PJH6_177 | PYYYYGMDV | 9 | 4661 |
| PJH6_178 | IYYYYGMDV | 9 | 4662 |
| PJH6_179 | TYYYYGMDV | 9 | 4663 |
| PJH6_180 | GYYYYGMDV | 9 | 4664 |
| PJH6_181 | VYYYYGMDV | 9 | 4665 |
| PJH6_182 | AYYYYGMDV | 9 | 4666 |
| PJH6_183 | DYYYYYGMDV | 10 | 4635 |
| PJH6_184 | YYYYYYGMDV | 10 | 4642 |
| PJH6_185 | HYYYYYGMDV | 10 | 4643 |
| PJH6_186 | FYYYYYGMDV | 10 | 4644 |
| PJH6_187 | SYYYYYGMDV | 10 | 4645 |
| PJH6_188 | RYYYYYGMDV | 10 | 4646 |
| PJH6_189 | LYYYYYGMDV | 10 | 4647 |
| PJH6_190 | PYYYYYGMDV | 10 | 4648 |
| PJH6_191 | IYYYYYGMDV | 10 | 4649 |
| PJH6_192 | TYYYYYGMDV | 10 | 4650 |
| PJH6_193 | GYYYYYGMDV | 10 | 4651 |
| PJH6_194 | VYYYYYGMDV | 10 | 4652 |
| PJH6_195 | AYYYYYGMDV | 10 | 4653 |
| PJH6_196 | NYYYYYGMDV | 10 | 4680 |
| PJH6_197A | DYYYYYYMDV | 10 | 4681 |
| PJH6_197B | YYYYYYYMDV | 10 | 4688 |

### EQUIVALENTS

[0342] Those skilled in the art will recognize, or be able to ascertain using no more than routine experimentation, many equivalents to the specific embodiments and methods described herein. Such equivalents are intended to be encompassed by the scope of the following claims.

APPENDIX A
GI NUMBERS OF 3,571 SEQUENCES IN THE
HEALTHY PREIMMUNE SET (HPS)

| | | | |
|---|---|---|---|
| 33628 | 1052674 | 1685242 | 1770847 |
| 37745 | 1052676 | 1685246 | 1770848 |
| 37747 | 1052683 | 1685248 | 1770851 |
| 37749 | 1052685 | 1685250 | 1770852 |
| 37751 | 1052691 | 1685252 | 1770853 |
| 37753 | 1052692 | 1685254 | 1770854 |
| 37755 | 1052693 | 1685256 | 1770855 |
| 37757 | 1052695 | 1685258 | 1770860 |
| 37759 | 1154682 | 1685260 | 1770861 |
| 37761 | 1154691 | 1685264 | 1770865 |
| 37763 | 1154698 | 1685266 | 1770866 |
| 37765 | 1154699 | 1685268 | 1770867 |
| 37767 | 1154706 | 1770744 | 1770869 |
| 37769 | 1154710 | 1770746 | 1770870 |
| 37773 | 1154713 | 1770747 | 1770872 |
| 37777 | 1154715 | 1770751 | 1770874 |
| 38383 | 1154724 | 1770755 | 1770875 |
| 38391 | 1154754 | 1770756 | 1770876 |
| 38393 | 1154769 | 1770758 | 1770877 |
| 38397 | 1154770 | 1770759 | 1770878 |
| 38401 | 1154805 | 1770761 | 1770879 |
| 185292 | 1154807 | 1770763 | 1770880 |
| 264183 | 1154808 | 1770765 | 1770881 |
| 297147 | 1154809 | 1770766 | 1770882 |
| 306949 | 1154810 | 1770770 | 1770883 |
| 306951 | 1154811 | 1770771 | 1770884 |
| 306953 | 1154813 | 1770772 | 1770885 |
| 483332 | 1154818 | 1770775 | 1770887 |
| 483333 | 1154820 | 1770776 | 1770888 |
| 483335 | 1154822 | 1770777 | 1770891 |
| 483336 | 1154824 | 1770779 | 1770892 |
| 483338 | 1154825 | 1770780 | 1770893 |
| 483339 | 1154834 | 1770783 | 1770894 |
| 483348 | 1154837 | 1770784 | 1770895 |
| 483350 | 1154838 | 1770785 | 1770896 |
| 510999 | 1154839 | 1770789 | 1770898 |
| 547164 | 1154840 | 1770791 | 1770902 |
| 587252 | 1154841 | 1770792 | 1770904 |
| 587254 | 1154843 | 1770793 | 1770905 |
| 587266 | 1154844 | 1770794 | 1770906 |
| 587276 | 1154845 | 1770795 | 1770908 |
| 587278 | 1154847 | 1770796 | 1770909 |
| 587280 | 1154848 | 1770797 | 1770910 |
| 587286 | 1197299 | 1770799 | 1770911 |
| 587288 | 1197300 | 1770800 | 1770912 |
| 587291 | 1197304 | 1770801 | 1770913 |
| 587293 | 1197307 | 1770805 | 1770914 |
| 587295 | 1197308 | 1770806 | 1770915 |
| 587299 | 1197309 | 1770807 | 1770916 |
| 587301 | 1197312 | 1770808 | 1770918 |
| 587304 | 1197313 | 1770809 | 1770922 |
| 587306 | 1197314 | 1770810 | 1770932 |
| 587308 | 1197315 | 1770811 | 1770936 |
| 587311 | 1197316 | 1770812 | 1770937 |
| 587313 | 1197318 | 1770813 | 1770950 |
| 587315 | 1197319 | 1770814 | 1770952 |
| 587317 | 1197321 | 1770815 | 1770954 |
| 1052611 | 1197322 | 1770816 | 1770958 |
| 1052620 | 1197323 | 1770817 | 1770961 |
| 1052622 | 1197324 | 1770818 | 1770962 |
| 1052626 | 1197325 | 1770820 | 1770963 |
| 1052627 | 1197326 | 1770822 | 1770964 |
| 1052634 | 1197327 | 1770824 | 1770967 |
| 1052637 | 1197328 | 1770826 | 1770969 |
| 1052639 | 1495508 | 1770829 | 1770971 |
| 1052640 | 1495511 | 1770830 | 1770972 |
| 1052642 | 1495512 | 1770831 | 1770974 |
| 1052644 | 1495516 | 1770833 | 1770976 |
| 1052655 | 1495518 | 1770835 | 1770979 |
| 1052656 | 1592729 | 1770836 | 1770981 |
| 1052657 | 1685210 | 1770837 | 1770982 |
| 1052658 | 1685220 | 1770839 | 1770983 |
| 1052659 | 1685222 | 1770840 | 1770989 |
| 1052662 | 1685228 | 1770843 | 1770992 |
| 1052668 | 1685234 | 1770844 | 1770994 |
| 1052669 | 1685238 | 1770845 | 1770995 |
| 1052671 | 1685240 | 1770846 | 1770997 |
| 1770998 | 1791142 | 3170752 | 3170974 |
| 1771002 | 1791144 | 3170754 | 3170978 |
| 1771004 | 1791152 | 3170756 | 3170980 |
| 1771008 | 1791154 | 3170758 | 3170984 |
| 1771010 | 1791160 | 3170760 | 3170986 |
| 1771014 | 1791164 | 3170762 | 3170988 |
| 1771016 | 1791176 | 3170764 | 3170990 |
| 1771017 | 1791182 | 3170766 | 3170992 |
| 1771018 | 1791184 | 3170768 | 3171006 |
| 1771022 | 1791186 | 3170772 | 3171008 |
| 1771026 | 1791190 | 3170774 | 3171010 |
| 1771027 | 1791194 | 3170778 | 3171016 |
| 1771029 | 1791196 | 3170782 | 3171018 |
| 1771033 | 1791200 | 3170784 | 3171020 |
| 1771034 | 1791204 | 3170786 | 3171022 |
| 1771035 | 1791206 | 3170788 | 3171024 |
| 1771036 | 1869905 | 3170794 | 3171026 |
| 1771038 | 1869907 | 3170796 | 3171028 |
| 1771039 | 1869912 | 3170802 | 3171030 |
| 1771042 | 1869913 | 3170808 | 3171038 |
| 1771044 | 1869915 | 3170810 | 3171040 |
| 1771045 | 1869918 | 3170812 | 3171042 |
| 1771055 | 1869919 | 3170816 | 3171044 |
| 1771057 | 1934921 | 3170820 | 3171242 |
| 1771058 | 2367538 | 3170822 | 3608440 |
| 1771059 | 2388836 | 3170824 | 3608462 |
| 1771060 | 2388837 | 3170826 | 3954953 |
| 1771061 | 2388839 | 3170830 | 3954955 |
| 1771063 | 2388840 | 3170832 | 4530538 |
| 1791008 | 2388841 | 3170834 | 4530544 |
| 1791010 | 2388842 | 3170836 | 4753741 |
| 1791012 | 2388843 | 3170840 | 4959477 |
| 1791018 | 2388846 | 3170842 | 4995315 |
| 1791020 | 2388847 | 3170844 | 4995317 |
| 1791026 | 2388848 | 3170846 | 4995319 |
| 1791028 | 2388851 | 3170848 | 4995321 |
| 1791030 | 2388852 | 3170852 | 4995323 |
| 1791032 | 2388853 | 3170854 | 4995325 |
| 1791034 | 2388856 | 3170856 | 4995327 |
| 1791036 | 2388859 | 3170858 | 4995329 |
| 1791040 | 2388861 | 3170862 | 4995331 |
| 1791042 | 2388862 | 3170864 | 4995333 |
| 1791046 | 2388863 | 3170866 | 4995335 |
| 1791050 | 2388864 | 3170868 | 4995337 |
| 1791052 | 2388865 | 3170870 | 4995339 |
| 1791054 | 2388868 | 3170872 | 4995341 |
| 1791058 | 2388871 | 3170874 | 4995343 |
| 1791060 | 2388873 | 3170876 | 4995345 |
| 1791062 | 2388875 | 3170878 | 4995347 |
| 1791064 | 2388876 | 3170880 | 4995349 |
| 1791072 | 2388878 | 3170882 | 4995351 |
| 1791074 | 2773082 | 3170884 | 4995353 |
| 1791076 | 3170658 | 3170890 | 4995355 |
| 1791078 | 3170662 | 3170894 | 4995357 |
| 1791080 | 3170664 | 3170898 | 4995359 |
| 1791082 | 3170668 | 3170902 | 4995361 |
| 1791084 | 3170670 | 3170908 | 4995365 |
| 1791086 | 3170686 | 3170910 | 4995367 |
| 1791088 | 3170688 | 3170916 | 4995375 |
| 1791090 | 3170692 | 3170918 | 4995383 |
| 1791096 | 3170694 | 3170922 | 4995385 |
| 1791098 | 3170696 | 3170924 | 4995389 |
| 1791100 | 3170702 | 3170926 | 4995391 |
| 1791104 | 3170704 | 3170930 | 4995393 |
| 1791106 | 3170712 | 3170932 | 4995397 |
| 1791108 | 3170714 | 3170934 | 4995399 |
| 1791110 | 3170716 | 3170936 | 4995400 |
| 1791112 | 3170720 | 3170938 | 4995404 |
| 1791114 | 3170722 | 3170944 | 4995406 |
| 1791116 | 3170726 | 3170946 | 4995408 |
| 1791118 | 3170728 | 3170954 | 4995410 |
| 1791122 | 3170730 | 3170958 | 4995418 |
| 1791124 | 3170734 | 3170960 | 4995422 |
| 1791130 | 3170736 | 3170964 | 4995426 |
| 1791132 | 3170738 | 3170966 | 4995428 |
| 1791134 | 3170740 | 3170968 | 4995430 |
| 1791136 | 3170748 | 3170970 | 4995432 |
| 4995434 | 5834089 | 6531600 | 8489286 |
| 4995436 | 5834091 | 6723523 | 8489289 |
| 4995438 | 5834093 | 6723525 | 8489291 |
| 4995440 | 5834095 | 6723527 | 11137164 |
| 4995442 | 5834097 | 6723531 | 11137170 |
| 4995446 | 5834099 | 6723535 | 11137172 |
| 4995456 | 5834101 | 6723537 | 11137174 |
| 4995462 | 5834103 | 6723543 | 11137178 |
| 4995466 | 5834105 | 6723545 | 11137183 |
| 4995470 | 5834107 | 6723549 | 11137186 |
| 4995474 | 5834109 | 6723551 | 11137188 |
| 4995476 | 5834113 | 6723558 | 11137196 |
| 4995478 | 5834115 | 6723565 | 11137200 |
| 4995480 | 5834119 | 6723581 | 11137205 |
| 4995482 | 5834121 | 6723583 | 11137215 |
| 4995484 | 5834123 | 6723595 | 11137219 |
| 4995486 | 5834125 | 6723597 | 11137229 |
| 4995488 | 5834127 | 6723599 | 11137231 |
| 4995490 | 5834129 | 7161042 | 11137242 |
| 4995492 | 5834131 | 7161061 | 11137251 |
| 4995494 | 5834133 | 7161129 | 11137253 |
| 4995496 | 5834135 | 7161136 | 11137261 |
| 4995498 | 5834137 | 7161164 | 11137262 |
| 4995500 | 5834139 | 8249510 | 11137274 |
| 4995502 | 5834141 | 8249514 | 11137276 |
| 4995504 | 5834143 | 8249518 | 11137279 |
| 4995506 | 5834145 | 8249524 | 11137281 |
| 4995508 | 5834147 | 8249528 | 11137283 |
| 4995510 | 5834149 | 8249538 | 11137285 |
| 4995512 | 5834151 | 8249546 | 11137289 |
| 4995514 | 5834153 | 8249552 | 11137290 |
| 4995516 | 5834155 | 8249554 | 11137293 |
| 4995520 | 5834159 | 8249558 | 11137295 |
| 4995524 | 5834161 | 8249560 | 11137298 |
| 4995530 | 5834163 | 8249562 | 11137301 |
| 4995535 | 5834165 | 8249566 | 11137303 |
| 4995537 | 5834169 | 8249568 | 11137305 |
| 4995539 | 5834175 | 8249608 | 11137307 |
| 4995549 | 5834177 | 8249622 | 11137309 |
| 4995555 | 5834179 | 8249632 | 11137313 |
| 4995557 | 5834183 | 8249650 | 11137315 |
| 4995563 | 5834185 | 8249652 | 11137317 |
| 4995569 | 5834187 | 8249654 | 11137319 |
| 4995575 | 5834191 | 8249656 | 11137322 |
| 4995581 | 5834193 | 8249662 | 11137326 |
| 4995589 | 5834195 | 8249674 | 11137329 |
| 4995591 | 5834197 | 8249682 | 11137333 |
| 5833973 | 5834199 | 8249698 | 11137335 |
| 5833980 | 5834201 | 8249712 | 11137339 |
| 5833984 | 5834203 | 8249716 | 11137343 |
| 5833986 | 5834205 | 8249718 | 11137348 |
| 5834003 | 5834207 | 8249730 | 11137350 |
| 5834011 | 5834209 | 8249738 | 11137352 |
| 5834015 | 5834213 | 8249740 | 11137354 |
| 5834019 | 5834215 | 8249744 | 11137359 |
| 5834031 | 6013039 | 8249754 | 11137361 |
| 5834035 | 6013043 | 8249756 | 11137363 |
| 5834037 | 6013045 | 8249760 | 11137365 |
| 5834039 | 6531445 | 8249772 | 11137367 |
| 5834041 | 6531457 | 8249778 | 11137369 |
| 5834043 | 6531461 | 8249784 | 11137371 |
| 5834047 | 6531465 | 8249786 | 11137373 |
| 5834049 | 6531481 | 8249788 | 11137375 |
| 5834051 | 6531489 | 8249790 | 11137377 |
| 5834053 | 6531493 | 8249812 | 11137379 |
| 5834055 | 6531495 | 8249816 | 11137382 |
| 5834057 | 6531507 | 8249826 | 11137386 |
| 5834059 | 6531509 | 8249828 | 11137388 |
| 5834065 | 6531511 | 8249838 | 11137392 |
| 5834069 | 6531513 | 8250248 | 11137399 |
| 5834071 | 6531517 | 8250255 | 11137403 |
| 5834073 | 6531521 | 8489274 | 11137407 |
| 5834075 | 6531525 | 8489276 | 11137411 |
| 5834077 | 6531533 | 8489278 | 11137413 |
| 5834079 | 6531537 | 8489280 | 11137415 |
| 5834081 | 6531539 | 8489282 | 11137418 |
| 5834083 | 6531554 | 8489284 | 11137420 |
| 11137422 | 13172069 | 21702275 | 47846518 |
| 11137426 | 13172073 | 21702277 | 47846520 |
| 11137428 | 13172083 | 21702281 | 47846524 |
| 11137430 | 13172091 | 21702282 | 47846526 |
| 11137432 | 13172093 | 21702287 | 47846528 |
| 11137439 | 13172099 | 21702289 | 47846530 |
| 11137441 | 13172117 | 21702291 | 47846532 |
| 11137445 | 13172125 | 21702293 | 47846534 |
| 11137448 | 13172129 | 21702295 | 47846538 |
| 11137450 | 13172133 | 21702297 | 47846540 |
| 11137452 | 13172135 | 21702299 | 47846542 |
| 11137454 | 13172137 | 21702301 | 47846544 |
| 11137460 | 13172141 | 21702303 | 47846546 |
| 11137462 | 13172143 | 21702305 | 47846548 |
| 11137467 | 13172147 | 21702307 | 47846550 |
| 11137470 | 13172149 | 21702309 | 47846558 |
| 11137474 | 13172151 | 21702311 | 47846562 |
| 11137476 | 13172155 | 21702313 | 47846564 |
| 11137480 | 13172157 | 21702314 | 47846566 |
| 11137482 | 13172159 | 21702315 | 47846570 |
| 11137487 | 13172163 | 23337033 | 47846572 |
| 11137494 | 13172169 | 27370812 | 47846574 |
| 11137500 | 13172177 | 31076438 | 47846578 |
| 11137502 | 13623574 | 33873883 | 47846580 |
| 11137507 | 14289029 | 33989177 | 47846582 |
| 11137509 | 14289035 | 37987904 | 47846586 |
| 13171905 | 14289037 | 37987932 | 47846588 |
| 13171909 | 14289049 | 37987938 | 47846590 |
| 13171911 | 14289057 | 37987960 | 47846594 |
| 13171913 | 14289061 | 37987970 | 47846596 |
| 13171915 | 14289065 | 39644659 | 47846598 |
| 13171917 | 14289067 | 39645530 | 47846600 |
| 13171921 | 14289071 | 47846366 | 47846602 |
| 13171923 | 14289073 | 47846370 | 47846604 |
| 13171925 | 14289079 | 47846372 | 47846606 |
| 13171927 | 14289097 | 47846376 | 47846612 |
| 13171929 | 14289099 | 47846378 | 47846614 |
| 13171931 | 14289109 | 47846380 | 47846618 |
| 13171935 | 14289111 | 47846386 | 47846620 |
| 13171937 | 16075408 | 47846388 | 47846626 |
| 13171939 | 16075410 | 47846394 | 47846632 |
| 13171941 | 16075412 | 47846398 | 47846644 |
| 13171945 | 16075414 | 47846416 | 47846646 |
| 13171947 | 16075416 | 47846418 | 47846658 |
| 13171949 | 16075418 | 47846420 | 47846660 |
| 13171951 | 16075420 | 47846422 | 47846664 |
| 13171953 | 16075422 | 47846426 | 47846666 |
| 13171955 | 16075424 | 47846428 | 47846674 |
| 13171957 | 16075426 | 47846430 | 47846678 |
| 13171959 | 16075428 | 47846432 | 47846680 |
| 13171961 | 16075430 | 47846434 | 47846684 |
| 13171965 | 16075432 | 47846438 | 47846690 |
| 13171967 | 16075434 | 47846442 | 47846692 |
| 13171969 | 16075436 | 47846446 | 47846696 |
| 13171971 | 16075438 | 47846448 | 47846698 |
| 13171973 | 16075440 | 47846450 | 47846716 |
| 13171975 | 16075442 | 47846456 | 47846718 |
| 13171977 | 16075444 | 47846458 | 47846724 |
| 13171981 | 16075448 | 47846466 | 47846728 |
| 13171987 | 16075450 | 47846468 | 47846730 |
| 13171999 | 16075452 | 47846472 | 47846734 |
| 13172003 | 16075454 | 47846476 | 47846750 |
| 13172005 | 16075456 | 47846478 | 47846752 |
| 13172007 | 16075458 | 47846482 | 47846756 |
| 13172009 | 16075460 | 47846484 | 47846762 |
| 13172013 | 16075464 | 47846486 | 47846764 |
| 13172019 | 16075466 | 47846488 | 47846768 |
| 13172021 | 16076270 | 47846490 | 47846778 |
| 13172025 | 16076286 | 47846492 | 47846782 |
| 13172027 | 17511791 | 47846494 | 47846784 |
| 13172033 | 18044958 | 47846498 | 47846786 |
| 13172037 | 19171939 | 47846506 | 49256420 |
| 13172043 | 19550754 | 47846508 | 49256426 |
| 13172045 | 19848531 | 47846510 | 49258105 |
| 13172053 | 19848533 | 47846512 | 49523831 |
| 13172061 | 19848543 | 47846514 | 49523833 |
| 13172065 | 19848545 | 47846516 | 49523835 |
| 49523837 | 54779258 | 54780723 | 145910938 |
| 49523841 | 54779260 | 54780731 | 145910942 |
| 49523843 | 54779262 | 54780733 | 145910945 |
| 49523849 | 54779264 | 54780735 | 145910949 |
| 49523851 | 54779266 | 54780741 | 145910952 |
| 49523853 | 54779268 | 54780745 | 145910955 |
| 49523855 | 54779270 | 54780753 | 145910958 |
| 49523861 | 54779272 | 54780757 | 145910966 |
| 49523865 | 54779274 | 54780759 | 145910969 |
| 49523871 | 54779276 | 54780761 | 145910972 |
| 49523873 | 54779278 | 54780763 | 145910975 |
| 49523879 | 54779280 | 54780765 | 145910983 |
| 49523881 | 54779282 | 54780767 | 145910986 |
| 49523887 | 54779284 | 54780771 | 145910989 |
| 49523895 | 54779286 | 54780775 | 145910992 |
| 49523905 | 54779288 | 54780777 | 145910995 |
| 49523919 | 54779290 | 54780779 | 145910998 |
| 49523921 | 54779292 | 54780781 | 145911001 |
| 49523923 | 54779296 | 54780783 | 145911004 |
| 49523927 | 54779298 | 54780785 | 145911013 |
| 49523929 | 54779300 | 54780787 | 145911017 |
| 49523931 | 54779302 | 54780791 | 145911020 |
| 49523946 | 54779306 | 54780793 | 145911023 |
| 49523950 | 54779308 | 54780795 | 145911026 |
| 54779136 | 54779310 | 54780801 | 145911029 |
| 54779140 | 54779314 | 54780803 | 145911032 |
| 54779142 | 54779316 | 54780805 | 145911038 |
| 54779144 | 54779318 | 54780807 | 145911041 |
| 54779146 | 54779320 | 54780809 | 145911044 |
| 54779148 | 54779322 | 54780815 | 145911047 |
| 54779150 | 54779324 | 54780817 | 145911050 |
| 54779152 | 54779328 | 54780821 | 145911053 |
| 54779156 | 54779330 | 54780825 | 145911061 |
| 54779158 | 54779332 | 54780827 | 145911064 |
| 54779160 | 54779334 | 54780831 | 145911072 |
| 54779162 | 54779336 | 54780833 | 145911075 |
| 54779166 | 54779338 | 54780835 | 145911081 |
| 54779168 | 54779340 | 54780837 | 145911086 |
| 54779170 | 54779342 | 54780839 | 145911090 |
| 54779172 | 54779344 | 54780841 | 145911092 |
| 54779174 | 54779350 | 54780843 | 145911096 |
| 54779178 | 54779354 | 54780845 | 145911102 |
| 54779180 | 54779356 | 54780847 | 145911105 |
| 54779182 | 54779358 | 54780853 | 145911108 |
| 54779184 | 54779360 | 54780857 | 145911111 |
| 54779186 | 54779362 | 54780859 | 145911133 |
| 54779188 | 54779364 | 54780861 | 145911150 |
| 54779190 | 54780155 | 54780863 | 145911156 |
| 54779192 | 54780163 | 55228577 | 145911159 |
| 54779194 | 54780167 | 55228579 | 145911162 |
| 54779196 | 54780171 | 55228584 | 145911165 |
| 54779198 | 54780177 | 55228638 | 145911171 |
| 54779200 | 54780179 | 55228640 | 145911174 |
| 54779204 | 54780185 | 55228646 | 145911177 |
| 54779206 | 54780187 | 55228650 | 145911180 |
| 54779208 | 54780191 | 55228651 | 145911183 |
| 54779210 | 54780193 | 55228652 | 145911186 |
| 54779212 | 54780209 | 60688113 | 145911190 |
| 54779214 | 54780211 | 74095346 | 145911193 |
| 54779218 | 54780213 | 74095348 | 145911199 |
| 54779220 | 54780227 | 74095350 | 145911202 |
| 54779222 | 54780229 | 74095355 | 145911205 |
| 54779224 | 54780235 | 74095358 | 145911214 |
| 54779226 | 54780237 | 91979763 | 145911217 |
| 54779228 | 54780239 | 91979789 | 145911220 |
| 54779230 | 54780243 | 91979839 | 145911223 |
| 54779232 | 54780247 | 91979849 | 145911226 |
| 54779234 | 54780251 | 111918091 | 145911235 |
| 54779236 | 54780253 | 111918116 | 145911238 |
| 54779238 | 54780259 | 111918127 | 145911248 |
| 54779240 | 54780709 | 111918184 | 145911257 |
| 54779242 | 54780711 | 111918251 | 145911287 |
| 54779244 | 54780713 | 111918262 | 145911291 |
| 54779248 | 54780715 | 111918647 | 145911294 |
| 54779250 | 54780717 | 121488404 | 145911298 |
| 54779252 | 54780719 | 145910925 | 145911301 |
| 54779256 | 54780721 | 145910934 | 145911305 |
| 145911308 | 145911823 | 145912707 | 145913746 |
| 145911311 | 145911832 | 145912717 | 145913752 |
| 145911314 | 145911840 | 145912725 | 145913757 |
| 145911317 | 145911849 | 145912735 | 145913766 |
| 145911320 | 145911857 | 145912744 | 145913772 |
| 145911323 | 145911883 | 145912753 | 145913777 |
| 145911326 | 145911892 | 145912760 | 145913782 |
| 145911329 | 145911914 | 145912780 | 145913787 |
| 145911332 | 145911936 | 145912790 | 145913792 |
| 145911335 | 145911938 | 145912799 | 145913797 |
| 145911338 | 145911940 | 145912814 | 145913803 |
| 145911341 | 145911942 | 145912824 | 145913808 |
| 145911344 | 145911944 | 145912844 | 145913813 |
| 145911347 | 145911946 | 145912853 | 145913840 |
| 145911350 | 145911948 | 145912861 | 145913852 |
| 145911353 | 145911950 | 145912868 | 145913856 |
| 145911356 | 145911953 | 145912879 | 145913867 |
| 145911359 | 145911959 | 145912888 | 145913875 |
| 145911362 | 145911968 | 145912898 | 145913879 |
| 145911365 | 145911983 | 145912909 | 145913883 |
| 145911368 | 145911992 | 145912919 | 145913888 |
| 145911371 | 145912001 | 145912930 | 145913893 |
| 145911374 | 145912009 | 145912940 | 145913898 |
| 145911377 | 145912023 | 145912949 | 145913902 |
| 145911384 | 145912037 | 145912958 | 145913915 |
| 145911388 | 145912044 | 145912978 | 145913919 |
| 145911391 | 145912059 | 145912996 | 145913921 |
| 145911394 | 145912100 | 145913026 | 145913923 |
| 145911397 | 145912107 | 145913035 | 145913927 |
| 145911400 | 145912114 | 145913042 | 145913929 |
| 145911403 | 145912123 | 145913066 | 145913932 |
| 145911407 | 145912132 | 145913107 | 145913943 |
| 145911410 | 145912152 | 145913138 | 145913955 |
| 145911413 | 145912167 | 145913155 | 145913961 |
| 145911416 | 145912176 | 145913181 | 145913965 |
| 145911421 | 145912186 | 145913209 | 145913969 |
| 145911427 | 145912211 | 145913219 | 145913973 |
| 145911436 | 145912220 | 145913232 | 145913977 |
| 145911442 | 145912229 | 145913236 | 145913980 |
| 145911451 | 145912238 | 145913241 | 145913984 |
| 145911457 | 145912249 | 145913248 | 145913988 |
| 145911466 | 145912260 | 145913257 | 145913991 |
| 145911482 | 145912278 | 145913268 | 145913995 |
| 145911491 | 145912308 | 145913278 | 145914000 |
| 145911498 | 145912353 | 145913288 | 145914004 |
| 145911502 | 145912361 | 145913297 | 145914011 |
| 145911510 | 145912371 | 145913308 | 145914017 |
| 145911517 | 145912381 | 145913344 | 145914020 |
| 145911523 | 145912399 | 145913354 | 145914023 |
| 145911536 | 145912409 | 145913377 | 145914026 |
| 145911544 | 145912418 | 145913386 | 145914038 |
| 145911553 | 145912436 | 145913394 | 145914045 |
| 145911561 | 145912446 | 145913404 | 145914049 |
| 145911568 | 145912456 | 145913415 | 145914056 |
| 145911576 | 145912466 | 145913425 | 145914060 |
| 145911585 | 145912470 | 145913433 | 145914063 |
| 145911597 | 145912479 | 145913470 | 145938277 |
| 145911604 | 145912495 | 145913480 | 145938293 |
| 145911611 | 145912504 | 145913489 | 145938315 |
| 145911618 | 145912508 | 145913518 | 145938332 |
| 145911621 | 145912528 | 145913528 | 145938348 |
| 145911655 | 145912547 | 145913539 | 145938356 |
| 145911663 | 145912566 | 145913549 | 145938362 |
| 145911679 | 145912575 | 145913569 | 145938375 |
| 145911687 | 145912587 | 145913578 | 145938384 |
| 145911695 | 145912589 | 145913588 | 145938391 |
| 145911703 | 145912591 | 145913596 | 145938403 |
| 145911713 | 145912595 | 145913608 | 145938411 |
| 145911722 | 145912598 | 145913620 | 145938421 |
| 145911746 | 145912614 | 145913640 | 145938426 |
| 145911748 | 145912624 | 145913650 | 145938430 |
| 145911750 | 145912635 | 145913660 | 145938438 |
| 145911752 | 145912647 | 145913670 | 145938446 |
| 145911754 | 145912674 | 145913682 | 145938454 |
| 145911768 | 145912682 | 145913687 | 145938462 |
| 145911786 | 145912691 | 145913722 | 145938470 |
| 145911795 | 145912700 | 145913730 | 145938490 |
| 145938504 | 145939392 | 145940316 | 145940902 |
| 145938513 | 145939407 | 145940325 | 145940907 |
| 145938531 | 145939416 | 145940332 | 145940912 |
| 145938537 | 145939432 | 145940340 | 145940917 |
| 145938553 | 145939449 | 145940354 | 145940921 |
| 145938562 | 145939459 | 145940362 | 145940926 |
| 145938570 | 145939470 | 145940370 | 145940940 |
| 145938577 | 145939475 | 145940379 | 145941075 |
| 145938596 | 145939484 | 145940387 | 145941079 |
| 145938621 | 145939501 | 145940399 | 145941083 |
| 145938629 | 145939514 | 145940404 | 145941090 |
| 145938639 | 145939566 | 145940411 | 145941097 |
| 145938647 | 145939578 | 145940416 | 145941111 |
| 145938674 | 145939586 | 145940428 | 145941118 |
| 145938680 | 145939593 | 145940439 | 145941131 |
| 145938689 | 145939602 | 145940441 | 145941134 |
| 145938698 | 145939609 | 145940445 | 145941137 |
| 145938706 | 145939634 | 145940448 | 145941143 |
| 145938713 | 145939643 | 145940450 | 145941151 |
| 145938721 | 145939651 | 145940452 | 145941158 |
| 145938730 | 145939657 | 145940456 | 145941167 |
| 145938737 | 145939670 | 145940461 | 145941176 |
| 145938755 | 145939678 | 145940468 | 145941194 |
| 145938771 | 145939686 | 145940482 | 145941226 |
| 145938808 | 145939694 | 145940489 | 145941231 |
| 145938830 | 145939699 | 145940494 | 145941239 |
| 145938837 | 145939704 | 145940498 | 145941247 |
| 145938865 | 145939707 | 145940508 | 145941255 |
| 145938874 | 145939711 | 145940510 | 145941262 |
| 145938892 | 145939718 | 145940515 | 145941276 |
| 145938899 | 145939724 | 145940520 | 145941296 |
| 145938906 | 145939730 | 145940530 | 145941328 |
| 145938916 | 145939738 | 145940535 | 145941336 |
| 145938926 | 145939747 | 145940541 | 145941349 |
| 145938944 | 145939753 | 145940547 | 145941358 |
| 145938952 | 145939760 | 145940552 | 145941365 |
| 145938969 | 145939766 | 145940557 | 145941373 |
| 145938986 | 145939768 | 145940567 | 145941380 |
| 145938995 | 145939770 | 145940573 | 145941388 |
| 145939005 | 145939776 | 145940583 | 145941393 |
| 145939023 | 145939778 | 145940593 | 145941399 |
| 145939030 | 145939782 | 145940597 | 145941425 |
| 145939044 | 145939788 | 145940602 | 145941459 |
| 145939053 | 145939805 | 145940613 | 145941466 |
| 145939061 | 145939817 | 145940631 | 145941474 |
| 145939069 | 145939824 | 145940636 | 145941483 |
| 145939083 | 145939834 | 145940645 | 145941488 |
| 145939085 | 145939844 | 145940650 | 145941499 |
| 145939087 | 145939858 | 145940656 | 145941505 |
| 145939093 | 145939865 | 145940662 | 145941512 |
| 145939095 | 145939872 | 145940675 | 145941518 |
| 145939097 | 145939879 | 145940681 | 145941539 |
| 145939106 | 145939900 | 145940700 | 145941544 |
| 145939132 | 145939910 | 145940706 | 145941550 |
| 145939147 | 145939921 | 145940711 | 145941558 |
| 145939155 | 145939940 | 145940727 | 145941571 |
| 145939161 | 145939949 | 145940735 | 145941577 |
| 145939169 | 145939970 | 145940742 | 145941588 |
| 145939181 | 145939986 | 145940748 | 145941597 |
| 145939189 | 145940002 | 145940756 | 145941605 |
| 145939197 | 145940029 | 145940762 | 145941634 |
| 145939215 | 145940043 | 145940783 | 145941639 |
| 145939231 | 145940052 | 145940789 | 145941644 |
| 145939237 | 145940070 | 145940797 | 145941650 |
| 145939252 | 145940091 | 145940804 | 145941657 |
| 145939271 | 145940115 | 145940818 | 145941669 |
| 145939285 | 145940124 | 145940825 | 145941674 |
| 145939302 | 145940133 | 145940832 | 145941680 |
| 145939309 | 145940152 | 145940838 | 145941685 |
| 145939317 | 145940167 | 145940846 | 145941698 |
| 145939331 | 145940173 | 145940853 | 145941704 |
| 145939338 | 145940190 | 145940858 | 145941717 |
| 145939346 | 145940218 | 145940865 | 145941724 |
| 145939356 | 145940226 | 145940877 | 145941731 |
| 145939367 | 145940239 | 145940884 | 145941745 |
| 145939384 | 145940269 | 145940891 | 145941752 |
| 145941758 | 159034235 | 159034347 | 159034453 |
| 145941764 | 159034236 | 159034348 | 159034455 |
| 145941791 | 159034238 | 159034349 | 159034460 |
| 145941806 | 159034239 | 159034350 | 159034461 |
| 145941819 | 159034240 | 159034354 | 159034462 |
| 145941822 | 159034241 | 159034355 | 159034463 |
| 145941824 | 159034242 | 159034356 | 159034464 |
| 145941828 | 159034243 | 159034358 | 159034465 |
| 145941837 | 159034244 | 159034359 | 159034466 |
| 145941854 | 159034245 | 159034362 | 159034467 |
| 145941863 | 159034249 | 159034364 | 159034468 |
| 145941877 | 159034250 | 159034365 | 159034471 |
| 145941886 | 159034252 | 159034366 | 159034472 |
| 145941908 | 159034253 | 159034367 | 159034474 |
| 145941915 | 159034254 | 159034368 | 159034476 |
| 145941933 | 159034258 | 159034369 | 159034479 |
| 145942086 | 159034259 | 159034370 | 159034481 |
| 145942146 | 159034260 | 159034372 | 159034482 |
| 145942158 | 159034262 | 159034373 | 159034484 |
| 145942175 | 159034266 | 159034375 | 159034485 |
| 145942206 | 159034267 | 159034376 | 159034486 |
| 145942223 | 159034268 | 159034378 | 159034490 |
| 145942261 | 159034273 | 159034379 | 159034492 |
| 145942265 | 159034274 | 159034381 | 159034493 |
| 145942309 | 159034276 | 159034383 | 159034494 |
| 145942383 | 159034277 | 159034384 | 159034495 |
| 145942405 | 159034278 | 159034385 | 159034497 |
| 145942487 | 159034279 | 159034386 | 159034499 |
| 145942497 | 159034280 | 159034387 | 159034500 |
| 145942506 | 159034282 | 159034388 | 159034501 |
| 145942509 | 159034283 | 159034389 | 159034502 |
| 145942544 | 159034284 | 159034390 | 159034503 |
| 145942565 | 159034285 | 159034392 | 159034504 |
| 145942606 | 159034286 | 159034393 | 159034511 |
| 148717962 | 159034287 | 159034395 | 159034512 |
| 148717964 | 159034288 | 159034396 | 159034515 |
| 148717966 | 159034290 | 159034397 | 159034516 |
| 148910865 | 159034291 | 159034398 | 159034518 |
| 159034187 | 159034293 | 159034399 | 159034521 |
| 159034188 | 159034296 | 159034400 | 159034522 |
| 159034189 | 159034297 | 159034402 | 159034523 |
| 159034190 | 159034298 | 159034403 | 159034524 |
| 159034191 | 159034299 | 159034404 | 159034526 |
| 159034192 | 159034300 | 159034405 | 159034527 |
| 159034193 | 159034301 | 159034408 | 159034529 |
| 159034194 | 159034302 | 159034410 | 159034530 |
| 159034195 | 159034303 | 159034414 | 159034531 |
| 159034196 | 159034304 | 159034415 | 159034532 |
| 159034197 | 159034305 | 159034417 | 159034534 |
| 159034198 | 159034306 | 159034419 | 159034535 |
| 159034200 | 159034307 | 159034420 | 159034536 |
| 159034202 | 159034308 | 159034421 | 159034537 |
| 159034203 | 159034309 | 159034422 | 159034538 |
| 159034204 | 159034310 | 159034423 | 159034539 |
| 159034205 | 159034311 | 159034424 | 159034540 |
| 159034207 | 159034313 | 159034425 | 159034541 |
| 159034208 | 159034315 | 159034426 | 159034542 |
| 159034209 | 159034316 | 159034429 | 159034543 |
| 159034211 | 159034318 | 159034430 | 159034545 |
| 159034212 | 159034320 | 159034431 | 159034546 |
| 159034213 | 159034323 | 159034433 | 159034547 |
| 159034214 | 159034324 | 159034434 | 159034549 |
| 159034215 | 159034325 | 159034435 | 159034550 |
| 159034216 | 159034328 | 159034436 | 159034552 |
| 159034217 | 159034329 | 159034438 | 159034554 |
| 159034218 | 159034330 | 159034439 | 159034556 |
| 159034219 | 159034331 | 159034440 | 159034559 |
| 159034222 | 159034335 | 159034441 | 159034562 |
| 159034223 | 159034337 | 159034443 | 159034563 |
| 159034224 | 159034339 | 159034444 | 159034564 |
| 159034225 | 159034340 | 159034445 | 159034565 |
| 159034226 | 159034341 | 159034446 | 159034566 |
| 159034227 | 159034342 | 159034447 | 159034568 |
| 159034228 | 159034343 | 159034448 | 159034570 |
| 159034230 | 159034344 | 159034449 | 159034571 |
| 159034231 | 159034345 | 159034450 | 159034572 |
| 159034233 | 159034346 | 159034451 | 159034573 |
| 159034575 | 159034697 | 159034801 | 159034904 |
| 159034576 | 159034698 | 159034802 | 159034905 |
| 159034578 | 159034699 | 159034804 | 159034906 |
| 159034580 | 159034700 | 159034805 | 159034907 |
| 159034581 | 159034701 | 159034809 | 159034908 |
| 159034582 | 159034704 | 159034811 | 159034909 |
| 159034584 | 159034705 | 159034812 | 159034910 |
| 159034587 | 159034706 | 159034813 | 159034911 |
| 159034588 | 159034708 | 159034815 | 159034912 |
| 159034589 | 159034709 | 159034816 | 159034913 |
| 159034591 | 159034710 | 159034817 | 159034914 |
| 159034596 | 159034711 | 159034818 | 159034917 |
| 159034599 | 159034712 | 159034819 | 159034918 |
| 159034600 | 159034713 | 159034820 | 159034919 |
| 159034601 | 159034714 | 159034821 | 159034920 |
| 159034602 | 159034717 | 159034822 | 159034923 |
| 159034604 | 159034718 | 159034823 | 159034925 |
| 159034607 | 159034720 | 159034824 | 159034926 |
| 159034609 | 159034721 | 159034825 | 159034928 |
| 159034611 | 159034722 | 159034827 | 159034929 |
| 159034612 | 159034725 | 159034828 | 159034931 |
| 159034613 | 159034726 | 159034829 | 159034934 |
| 159034617 | 159034728 | 159034831 | 159034935 |
| 159034619 | 159034729 | 159034832 | 159034936 |
| 159034620 | 159034730 | 159034833 | 159034937 |
| 159034621 | 159034731 | 159034834 | 159034938 |
| 159034622 | 159034732 | 159034835 | 159034939 |
| 159034625 | 159034733 | 159034837 | 159034940 |
| 159034626 | 159034734 | 159034838 | 159034942 |
| 159034628 | 159034736 | 159034839 | 159034945 |
| 159034629 | 159034737 | 159034840 | 159034946 |
| 159034631 | 159034738 | 159034842 | 159034947 |
| 159034632 | 159034741 | 159034843 | 159034948 |
| 159034634 | 159034742 | 159034844 | 159034950 |
| 159034635 | 159034743 | 159034845 | 159034952 |
| 159034636 | 159034744 | 159034846 | 159034953 |
| 159034637 | 159034745 | 159034847 | 159034954 |
| 159034638 | 159034747 | 159034848 | 159034955 |
| 159034640 | 159034748 | 159034849 | 159034957 |
| 159034641 | 159034749 | 159034852 | 159034959 |
| 159034642 | 159034750 | 159034853 | 159034961 |
| 159034643 | 159034751 | 159034856 | 159034962 |
| 159034647 | 159034752 | 159034858 | 159034963 |
| 159034648 | 159034754 | 159034859 | 159034964 |
| 159034649 | 159034756 | 159034860 | 159034965 |
| 159034650 | 159034758 | 159034861 | 159034967 |
| 159034651 | 159034759 | 159034862 | 159034970 |
| 159034652 | 159034760 | 159034863 | 159034971 |
| 159034653 | 159034762 | 159034864 | 159034973 |
| 159034654 | 159034763 | 159034866 | 159034974 |
| 159034657 | 159034764 | 159034869 | 159034975 |
| 159034658 | 159034765 | 159034871 | 159034976 |
| 159034659 | 159034766 | 159034872 | 159034978 |
| 159034660 | 159034767 | 159034874 | 159034980 |
| 159034661 | 159034768 | 159034876 | 159034981 |
| 159034664 | 159034771 | 159034877 | 159034982 |
| 159034665 | 159034773 | 159034879 | 159034983 |
| 159034668 | 159034774 | 159034880 | 159034984 |
| 159034669 | 159034778 | 159034882 | 159034985 |
| 159034672 | 159034779 | 159034883 | 159034987 |
| 159034673 | 159034780 | 159034885 | 159034988 |
| 159034676 | 159034781 | 159034886 | 159034989 |
| 159034677 | 159034782 | 159034887 | 159034991 |
| 159034678 | 159034783 | 159034888 | 159034992 |
| 159034679 | 159034784 | 159034889 | 159034993 |
| 159034680 | 159034786 | 159034890 | 159034995 |
| 159034681 | 159034787 | 159034892 | 159034996 |
| 159034683 | 159034788 | 159034893 | 159034997 |
| 159034686 | 159034789 | 159034894 | 159034998 |
| 159034687 | 159034790 | 159034895 | 159035002 |
| 159034688 | 159034791 | 159034897 | 159035003 |
| 159034689 | 159034793 | 159034898 | 159035005 |
| 159034690 | 159034794 | 159034899 | 159035007 |
| 159034692 | 159034795 | 159034900 | 159035008 |
| 159034693 | 159034796 | 159034901 | 159035009 |
| 159034695 | 159034798 | 159034902 | 159035010 |
| 159034696 | 159034799 | 159034903 | 159035013 |
| 159035014 | 159035117 | 159035234 | 159035362 |
| 159035015 | 159035118 | 159035235 | 159035363 |
| 159035016 | 159035120 | 159035238 | 159035364 |
| 159035017 | 159035122 | 159035239 | 159035366 |
| 159035018 | 159035123 | 159035240 | 159035368 |
| 159035021 | 159035124 | 159035241 | 159035369 |
| 159035022 | 159035125 | 159035242 | 159035370 |
| 159035023 | 159035126 | 159035245 | 159035372 |
| 159035024 | 159035128 | 159035247 | 159035373 |
| 159035025 | 159035129 | 159035250 | 159035374 |
| 159035026 | 159035130 | 159035253 | 159035378 |
| 159035027 | 159035131 | 159035256 | 159035380 |
| 159035028 | 159035133 | 159035257 | 159035382 |
| 159035031 | 159035134 | 159035260 | 159035384 |
| 159035033 | 159035135 | 159035261 | 159035385 |
| 159035034 | 159035136 | 159035262 | 159035386 |
| 159035035 | 159035137 | 159035263 | 159035390 |
| 159035036 | 159035138 | 159035264 | 159035391 |
| 159035038 | 159035139 | 159035265 | 159035393 |
| 159035039 | 159035140 | 159035267 | 159035394 |
| 159035040 | 159035143 | 159035268 | 159035395 |
| 159035041 | 159035145 | 159035269 | 159035400 |
| 159035042 | 159035146 | 159035270 | 159035401 |
| 159035043 | 159035147 | 159035272 | 159035402 |
| 159035044 | 159035149 | 159035273 | 159035403 |
| 159035045 | 159035150 | 159035274 | 159035404 |
| 159035046 | 159035151 | 159035275 | 159035405 |
| 159035047 | 159035152 | 159035277 | 159035406 |
| 159035049 | 159035155 | 159035279 | 159035407 |
| 159035050 | 159035158 | 159035280 | 159035408 |
| 159035051 | 159035159 | 159035282 | 159035413 |
| 159035052 | 159035160 | 159035284 | 159035418 |
| 159035053 | 159035162 | 159035285 | 159035420 |
| 159035054 | 159035163 | 159035287 | 159035422 |
| 159035055 | 159035164 | 159035288 | 159035423 |
| 159035056 | 159035166 | 159035289 | 159035424 |
| 159035057 | 159035170 | 159035290 | 159035425 |
| 159035058 | 159035172 | 159035292 | 159035426 |
| 159035060 | 159035173 | 159035293 | 159035427 |
| 159035061 | 159035174 | 159035294 | 159035430 |
| 159035063 | 159035175 | 159035296 | 159035432 |
| 159035064 | 159035176 | 159035299 | 159035433 |
| 159035065 | 159035177 | 159035302 | 159035435 |
| 159035066 | 159035179 | 159035303 | 159035436 |
| 159035067 | 159035180 | 159035305 | 159035437 |
| 159035072 | 159035181 | 159035307 | 159035439 |
| 159035073 | 159035182 | 159035308 | 159035441 |
| 159035074 | 159035183 | 159035309 | 159035445 |
| 159035075 | 159035185 | 159035310 | 159035446 |
| 159035076 | 159035186 | 159035312 | 159035447 |
| 159035079 | 159035187 | 159035313 | 159035449 |
| 159035080 | 159035188 | 159035314 | 159035450 |
| 159035081 | 159035191 | 159035315 | 159035451 |
| 159035083 | 159035192 | 159035316 | 159035452 |
| 159035084 | 159035193 | 159035318 | 159035453 |
| 159035085 | 159035194 | 159035319 | 159035454 |
| 159035086 | 159035195 | 159035320 | 159035456 |
| 159035087 | 159035199 | 159035321 | 159035457 |
| 159035089 | 159035201 | 159035323 | 159035458 |
| 159035090 | 159035204 | 159035327 | 159035459 |
| 159035092 | 159035205 | 159035329 | 159035461 |
| 159035097 | 159035206 | 159035330 | 159035463 |
| 159035100 | 159035207 | 159035331 | 159035464 |
| 159035101 | 159035208 | 159035334 | 159035466 |
| 159035102 | 159035209 | 159035335 | 159035468 |
| 159035103 | 159035210 | 159035338 | 159035470 |
| 159035104 | 159035211 | 159035342 | 159035472 |
| 159035106 | 159035212 | 159035343 | 159035473 |
| 159035108 | 159035213 | 159035344 | 159035475 |
| 159035109 | 159035215 | 159035346 | 159035476 |
| 159035110 | 159035218 | 159035348 | 159035477 |
| 159035111 | 159035221 | 159035349 | 159035479 |
| 159035112 | 159035224 | 159035350 | 159035483 |
| 159035113 | 159035226 | 159035351 | 159035484 |
| 159035114 | 159035227 | 159035353 | 159035490 |
| 159035115 | 159035230 | 159035360 | 159035492 |
| 159035116 | 159035232 | 159035361 | 159035493 |
| 159035496 | 159035605 | 162950148 | 162950323 |
| 159035497 | 159035609 | 162950152 | 162950325 |
| 159035498 | 159035610 | 162950188 | 162950326 |
| 159035499 | 159035611 | 162950189 | 162950327 |
| 159035501 | 159035612 | 162950191 | 162950328 |
| 159035502 | 159035614 | 162950199 | 162950329 |
| 159035503 | 159035618 | 162950202 | 162950330 |
| 159035507 | 159035619 | 162950204 | 162950333 |
| 159035508 | 159035624 | 162950205 | 162950334 |
| 159035512 | 159035626 | 162950210 | 162950335 |
| 159035513 | 159035627 | 162950211 | 162950337 |
| 159035514 | 159035628 | 162950213 | 162950338 |
| 159035515 | 159035630 | 162950227 | 162950339 |
| 159035516 | 159035631 | 162950241 | 162950341 |
| 159035519 | 159035632 | 162950243 | 162950342 |
| 159035520 | 159035633 | 162950244 | 162950343 |
| 159035523 | 159035634 | 162950245 | 162950344 |
| 159035524 | 159035636 | 162950248 | 162950345 |
| 159035525 | 159035637 | 162950249 | 162950347 |
| 159035526 | 159035638 | 162950250 | 162950348 |
| 159035527 | 159035640 | 162950251 | 162950350 |
| 159035528 | 159035641 | 162950252 | 162950352 |
| 159035529 | 159035642 | 162950253 | 162950353 |
| 159035531 | 159035644 | 162950254 | 162950355 |
| 159035532 | 159035646 | 162950255 | 162950359 |
| 159035533 | 159035649 | 162950257 | 162950360 |
| 159035535 | 159035650 | 162950258 | 162950361 |
| 159035536 | 159035653 | 162950260 | 162950363 |
| 159035537 | 159035655 | 162950261 | 162950365 |
| 159035538 | 159035656 | 162950263 | 162950367 |
| 159035541 | 159035658 | 162950265 | 162950369 |
| 159035542 | 159035659 | 162950266 | 162950372 |
| 159035546 | 159035661 | 162950267 | 162950373 |
| 159035548 | 159035662 | 162950269 | 162950374 |
| 159035549 | 159035663 | 162950270 | 162950375 |
| 159035550 | 159035664 | 162950272 | 162950377 |
| 159035552 | 162950025 | 162950273 | 162950381 |
| 159035553 | 162950028 | 162950275 | 162950382 |
| 159035554 | 162950034 | 162950277 | 162950384 |
| 159035556 | 162950035 | 162950278 | 162950385 |
| 159035557 | 162950039 | 162950279 | 162950386 |
| 159035559 | 162950043 | 162950282 | 162950387 |
| 159035560 | 162950050 | 162950284 | 162950388 |
| 159035562 | 162950051 | 162950285 | 162950390 |
| 159035563 | 162950052 | 162950286 | 162950391 |
| 159035564 | 162950054 | 162950287 | 162950392 |
| 159035565 | 162950055 | 162950288 | 162950393 |
| 159035566 | 162950057 | 162950289 | 162950394 |
| 159035567 | 162950065 | 162950290 | 162950396 |
| 159035568 | 162950067 | 162950291 | 162950397 |
| 159035569 | 162950077 | 162950292 | 162950398 |
| 159035570 | 162950097 | 162950293 | 162950399 |
| 159035571 | 162950098 | 162950294 | 162950400 |
| 159035573 | 162950100 | 162950295 | 162950401 |
| 159035574 | 162950111 | 162950296 | 162950404 |
| 159035575 | 162950114 | 162950297 | 162950405 |
| 159035576 | 162950115 | 162950298 | 162950406 |
| 159035577 | 162950120 | 162950299 | 162950408 |
| 159035581 | 162950121 | 162950300 | 162950410 |
| 159035582 | 162950123 | 162950301 | 162950411 |
| 159035583 | 162950125 | 162950302 | 162950416 |
| 159035584 | 162950126 | 162950303 | 162950418 |
| 159035585 | 162950127 | 162950305 | 162950419 |
| 159035586 | 162950128 | 162950306 | 162950420 |
| 159035589 | 162950129 | 162950308 | 162950421 |
| 159035590 | 162950130 | 162950309 | 162950423 |
| 159035591 | 162950132 | 162950310 | 162950425 |
| 159035592 | 162950133 | 162950311 | 162950426 |
| 159035593 | 162950134 | 162950312 | 162950428 |
| 159035594 | 162950137 | 162950313 | 162950430 |
| 159035595 | 162950138 | 162950314 | 162950431 |
| 159035596 | 162950139 | 162950315 | 162950432 |
| 159035597 | 162950140 | 162950316 | 162950433 |
| 159035598 | 162950141 | 162950317 | 162950434 |
| 159035602 | 162950143 | 162950318 | 162950435 |
| 159035603 | 162950146 | 162950319 | 162950437 |
| 159035604 | 162950147 | 162950321 | 162950438 |
| 162950439 | 162950566 | 162950674 | |
| 162950440 | 162950568 | 162950675 | |
| 162950441 | 162950570 | 162950676 | |
| 162950442 | 162950571 | 162950685 | |
| 162950444 | 162950572 | 162950686 | |
| 162950445 | 162950573 | 162950688 | |
| 162950446 | 162950574 | 162950689 | |
| 162950447 | 162950575 | 162950691 | |
| 162950449 | 162950577 | 162950692 | |
| 162950450 | 162950578 | 162950693 | |
| 162950451 | 162950579 | 162950694 | |
| 162950453 | 162950580 | 162950695 | |
| 162950454 | 162950581 | 162950696 | |
| 162950456 | 162950582 | 162950697 | |
| 162950461 | 162950583 | 162950698 | |
| 162950463 | 162950584 | 162950710 | |
| 162950464 | 162950585 | 162950714 | |
| 162950465 | 162950586 | 162950716 | |
| 162950466 | 162950587 | 162950720 | |
| 162950467 | 162950589 | 162950724 | |
| 162950469 | 162950590 | 162950725 | |
| 162950470 | 162950591 | 162950726 | |
| 162950471 | 162950592 | 162950728 | |
| 162950474 | 162950593 | 162950729 | |
| 162950476 | 162950594 | 194719560 | |
| 162950481 | 162950596 | 194719575 | |
| 162950483 | 162950597 | 218454113 | |
| 162950484 | 162950598 | 218454117 | |
| 162950485 | 162950599 | 219937557 | |
| 162950487 | 162950600 | | |
| 162950489 | 162950602 | | |
| 162950490 | 162950604 | | |
| 162950491 | 162950605 | | |
| 162950492 | 162950606 | | |
| 162950493 | 162950609 | | |
| 162950494 | 162950610 | | |
| 162950496 | 162950611 | | |
| 162950498 | 162950613 | | |
| 162950500 | 162950614 | | |
| 162950503 | 162950615 | | |
| 162950504 | 162950617 | | |
| 162950514 | 162950618 | | |
| 162950515 | 162950619 | | |
| 162950516 | 162950620 | | |
| 162950517 | 162950621 | | |
| 162950518 | 162950622 | | |
| 162950519 | 162950626 | | |
| 162950520 | 162950627 | | |
| 162950522 | 162950628 | | |
| 162950525 | 162950629 | | |
| 162950526 | 162950631 | | |
| 162950527 | 162950632 | | |
| 162950528 | 162950633 | | |
| 162950529 | 162950634 | | |
| 162950530 | 162950635 | | |
| 162950531 | 162950640 | | |
| 162950532 | 162950641 | | |
| 162950534 | 162950642 | | |
| 162950535 | 162950644 | | |
| 162950536 | 162950645 | | |
| 162950537 | 162950646 | | |
| 162950539 | 162950647 | | |
| 162950540 | 162950649 | | |
| 162950542 | 162950650 | | |
| 162950543 | 162950651 | | |
| 162950546 | 162950652 | | |
| 162950547 | 162950654 | | |
| 162950551 | 162950655 | | |
| 162950552 | 162950656 | | |
| 162950555 | 162950659 | | |
| 162950556 | 162950660 | | |
| 162950557 | 162950661 | | |
| 162950558 | 162950662 | | |
| 162950559 | 162950665 | | |
| 162950562 | 162950666 | | |
| 162950564 | 162950671 | | |
| 162950565 | 162950673 | | |

The application's sequence listing, which the Patent Office published only in electronic form, follows.

SEQUENCE LISTING (8761 sequences)

SEQ ID NO: 1 - protein, 8 aa, Homo sapiens
QQYNSYST

SEQ ID NO: 2 - protein, 8 aa, Homo sapiens
QQYNSYFT

SEQ ID NO: 3 - protein, 8 aa, Homo sapiens
QQYNSYLT

SEQ ID NO: 4 - protein, 8 aa, Homo sapiens
QQYNSYIT

SEQ ID NO: 5 - protein, 8 aa, Homo sapiens
QQYNSYRT

SEQ ID NO: 6 - protein, 8 aa, Homo sapiens
QQYNSYWT

SEQ ID NO: 7 - protein, 8 aa, Homo sapiens
QQYNSYYT

SEQ ID NO: 8 - protein, 9 aa, Homo sapiens
QQYNSYSPT

SEQ ID NO: 9 - protein, 9 aa, Homo sapiens
QQYNSYSFT

SEQ ID NO: 10 - protein, 9 aa, Homo sapiens
QQYNSYSLT

SEQ ID NO: 11 - protein, 9 aa, Homo sapiens
QQYNSYSIT

SEQ ID NO: 12 - protein, 9 aa, Homo sapiens
QQYNSYSRT

SEQ ID NO: 13 - protein, 9 aa, Homo sapiens
QQYNSYSWT

SEQ ID NO: 14 - protein, 9 aa, Homo sapiens
QQYNSYSYT

SEQ ID NO: 15 - protein, 10 aa, Homo sapiens
QQYNSYSPFT

SEQ ID NO: 16 - protein, 10 aa, Homo sapiens
QQYNSYSPLT

SEQ ID NO: 17 - protein, 10 aa, Homo sapiens
QQYNSYSPIT

SEQ ID NO: 18 - protein, 10 aa, Homo sapiens
QQYNSYSPRT

SEQ ID NO: 19 - protein, 10 aa, Homo sapiens
QQYNSYSPWT

SEQ ID NO: 20 - protein, 10 aa, Homo sapiens
QQYNSYSPYT

SEQ ID NO: 21 - protein, 8 aa, Homo sapiens
QQANSFPT

SEQ ID NO: 22 - protein, 8 aa, Homo sapiens
QQANSFFT

SEQ ID NO: 23 - protein, 8 aa, Homo sapiens
QQANSFLT

SEQ ID NO: 24 - protein, 8 aa, Homo sapiens
QQANSFIT

SEQ ID NO: 25 - protein, 8 aa, Homo sapiens
QQANSFRT

SEQ ID NO: 26 - protein, 8 aa, Homo sapiens
QQANSFWT

SEQ ID NO: 27 - protein, 8 aa, Homo sapiens
QQANSFYT

SEQ ID NO: 28 - protein, 9 aa, Homo sapiens
QQANSFPPT

SEQ ID NO: 29 - protein, 9 aa, Homo sapiens
QQANSFPFT

SEQ ID NO: 30 - protein, 9 aa, Homo sapiens
QQANSFPLT

SEQ ID NO: 31 - protein, 9 aa, Homo sapiens
QQANSFPIT

SEQ ID NO: 32 - protein, 9 aa, Homo sapiens
QQANSFPRT

SEQ ID NO: 33 - protein, 9 aa, Homo sapiens
QQANSFPWT

SEQ ID NO: 34 - protein, 9 aa, Homo sapiens
QQANSFPYT

SEQ ID NO: 35 - protein, 10 aa, Homo sapiens
QQANSFPPFT

SEQ ID NO: 36 - protein, 10 aa, Homo sapiens
QQANSFPPLT

SEQ ID NO: 37 - protein, 10 aa, Homo sapiens
QQANSFPPIT

SEQ ID NO: 38 - protein, 10 aa, Homo sapiens
QQANSFPPRT

SEQ ID NO: 39 - protein, 10 aa, Homo sapiens
QQANSFPPWT

SEQ ID NO: 40 - protein, 10 aa, Homo sapiens
QQANSFPPYT

SEQ ID NO: 41 - protein, 8 aa, Homo sapiens
QQYDNLPT

SEQ ID NO: 42 - protein, 8 aa, Homo sapiens
QQYDNLFT

SEQ ID NO: 43 - protein, 8 aa, Homo sapiens
QQYDNLLT

SEQ ID NO: 44 - protein, 8 aa, Homo sapiens
QQYDNLIT

SEQ ID NO: 45 - protein, 8 aa, Homo sapiens
QQYDNLRT

SEQ ID NO: 46 - protein, 8 aa, Homo sapiens
QQYDNLWT

SEQ ID NO: 47 - protein, 8 aa, Homo sapiens
QQYDNLYT

SEQ ID NO: 48 - protein, 9 aa, Homo sapiens
QQYDNLPPT

SEQ ID NO: 49 - protein, 9 aa, Homo sapiens
QQYDNLPFT

SEQ ID NO: 50 - protein, 9 aa, Homo sapiens
QQYDNLPLT

SEQ ID NO: 51 - protein, 9 aa, Homo sapiens
QQYDNLPIT

SEQ ID NO: 52 - protein, 9 aa, Homo sapiens
QQYDNLPRT

SEQ ID NO: 53 - protein, 9 aa, Homo sapiens
QQYDNLPWT

SEQ ID NO: 54 - protein, 9 aa, Homo sapiens
QQYDNLPYT

SEQ ID NO: 55 - protein, 10 aa, Homo sapiens
QQYDNLPPFT

SEQ ID NO: 56 - protein, 10 aa, Homo sapiens
QQYDNLPPLT

SEQ ID NO: 57 - protein, 10 aa, Homo sapiens
QQYDNLPPIT

SEQ ID NO: 58 - protein, 10 aa, Homo sapiens
QQYDNLPPRT

SEQ ID NO: 59 - protein, 10 aa, Homo sapiens
QQYDNLPPWT

SEQ ID NO: 60 - protein, 10 aa, Homo sapiens
QQYDNLPPYT

SEQ ID NO: 61 - protein, 8 aa, Homo sapiens
QQSYSTPT

SEQ ID NO: 62 - protein, 8 aa, Homo sapiens
QQSYSTFT

SEQ ID NO: 63 - protein, 8 aa, Homo sapiens
QQSYSTLT

SEQ ID NO: 64 - protein, 8 aa, Homo sapiens
QQSYSTIT

SEQ ID NO: 65 - protein, 8 aa, Homo sapiens
QQSYSTRT

SEQ ID NO: 66 - protein, 8 aa, Homo sapiens
QQSYSTWT

SEQ ID NO: 67 - protein, 8 aa, Homo sapiens
QQSYSTYT

SEQ ID NO: 68 - protein, 9 aa, Homo sapiens
QQSYSTPPT

SEQ ID NO: 69 - protein, 9 aa, Homo sapiens
QQSYSTPFT

SEQ ID NO: 70 - protein, 9 aa, Homo sapiens
QQSYSTPLT

SEQ ID NO: 71 - protein, 9 aa, Homo sapiens
QQSYSTPIT

SEQ ID NO: 72 - protein, 9 aa, Homo sapiens
QQSYSTPRT

SEQ ID NO: 73 - protein, 9 aa, Homo sapiens
QQSYSTPWT

SEQ ID NO: 74 - protein, 9 aa, Homo sapiens
QQSYSTPYT

SEQ ID NO: 75 - protein, 10 aa, Homo sapiens
QQSYSTPPFT

SEQ ID NO: 76 - protein, 10 aa, Homo sapiens
QQSYSTPPLT

SEQ ID NO: 77 - protein, 10 aa, Homo sapiens
QQSYSTPPIT

SEQ ID NO: 78 - protein, 10 aa, Homo sapiens
QQSYSTPPRT

SEQ ID NO: 79 - protein, 10 aa, Homo sapiens
QQSYSTPPWT

SEQ ID NO: 80 - protein, 10 aa, Homo sapiens
QQSYSTPPYT

SEQ ID NO: 81 - protein, 8 aa, Homo sapiens
QQYYSTPT

SEQ ID NO: 82 - protein, 8 aa, Homo sapiens
QQYYSTFT

SEQ ID NO: 83 - protein, 8 aa, Homo sapiens
QQYYSTLT

SEQ ID NO: 84 - protein, 8 aa, Homo sapiens
QQYYSTIT

SEQ ID NO: 85 - protein, 8 aa, Homo sapiens
QQYYSTRT

SEQ ID NO: 86 - protein, 8 aa, Homo sapiens
QQYYSTWT

SEQ ID NO: 87 - protein, 8 aa, Homo sapiens
QQYYSTYT

SEQ ID NO: 88 - protein, 9 aa, Homo sapiens
QQYYSTPPT

SEQ ID NO: 89 - protein, 9 aa, Homo sapiens
QQYYSTPFT

SEQ ID NO: 90 - protein, 9 aa, Homo sapiens
QQYYSTPLT

SEQ ID NO: 91 - protein, 9 aa, Homo sapiens
QQYYSTPIT

SEQ ID NO: 92 - protein, 9 aa, Homo sapiens
QQYYSTPRT

SEQ ID NO: 93 - protein, 9 aa, Homo sapiens
QQYYSTPWT

SEQ ID NO: 94 - protein, 9 aa, Homo sapiens
QQYYSTPYT

SEQ ID NO: 95 - protein, 10 aa, Homo sapiens
QQYYSTPPFT

SEQ ID NO: 96 - protein, 10 aa, Homo sapiens
QQYYSTPPLT

SEQ ID NO: 97 - protein, 10 aa, Homo sapiens
QQYYSTPPIT

SEQ ID NO: 98 - protein, 10 aa, Homo sapiens
QQYYSTPPRT

SEQ ID NO: 99 - protein, 10 aa, Homo sapiens
QQYYSTPPWT

SEQ ID NO: 100 - protein, 10 aa, Homo sapiens
QQYYSTPPYT

SEQ ID NO: 101 - protein, 8 aa, Homo sapiens
MQALQTPT

SEQ ID NO: 102 - protein, 8 aa, Homo sapiens
MQALQTFT

SEQ ID NO: 103 - protein, 8 aa, Homo sapiens
MQALQTLT

SEQ ID NO: 104 - protein, 8 aa, Homo sapiens
MQALQTIT

SEQ ID NO: 105 - protein, 8 aa, Homo sapiens
MQALQTRT

SEQ ID NO: 106 - protein, 8 aa, Homo sapiens
MQALQTWT

SEQ ID NO: 107 - protein, 8 aa, Homo sapiens
MQALQTYT

SEQ ID NO: 108 - protein, 9 aa, Homo sapiens
MQALQTPPT

SEQ ID NO: 109 - protein, 9 aa, Homo sapiens
MQALQTPFT

SEQ ID NO: 110 - protein, 9 aa, Homo sapiens
MQALQTPLT

SEQ ID NO: 111 - protein, 9 aa, Homo sapiens
MQALQTPIT

SEQ ID NO: 112 - protein, 9 aa, Homo sapiens
MQALQTPRT

SEQ ID NO: 113 - protein, 9 aa, Homo sapiens
MQALQTPWT

SEQ ID NO: 114 - protein, 9 aa, Homo sapiens
MQALQTPYT

SEQ ID NO: 115 - protein, 10 aa, Homo sapiens
MQALQTPPFT

SEQ ID NO: 116 - protein, 10 aa, Homo sapiens
MQALQTPPLT

SEQ ID NO: 117 - protein, 10 aa, Homo sapiens
MQALQTPPIT

SEQ ID NO: 118 - protein, 10 aa, Homo sapiens
MQALQTPPRT

SEQ ID NO: 119 - protein, 10 aa, Homo sapiens
MQALQTPPWT

SEQ ID NO: 120 - protein, 10 aa, Homo sapiens
MQALQTPPYT

SEQ ID NO: 121 - protein, 8 aa, Homo sapiens
QQRSNWPT

SEQ ID NO: 122 - protein, 8 aa, Homo sapiens
QQRSNWFT

SEQ ID NO: 123 - protein, 8 aa, Homo sapiens
QQRSNWLT

SEQ ID NO: 124 - protein, 8 aa, Homo sapiens
QQRSNWIT

SEQ ID NO: 125 - protein, 8 aa, Homo sapiens
QQRSNWRT

SEQ ID NO: 126 - protein, 8 aa, Homo sapiens
QQRSNWWT

SEQ ID NO: 127 - protein, 8 aa, Homo sapiens
QQRSNWYT

SEQ ID NO: 128 - protein, 9 aa, Homo sapiens
QQRSNWPPT

SEQ ID NO: 129 - protein, 9 aa, Homo sapiens
QQRSNWPFT

SEQ ID NO: 130 - protein, 9 aa, Homo sapiens
QQRSNWPLT

SEQ ID NO: 131 - protein, 9 aa, Homo sapiens
QQRSNWPIT

SEQ ID NO: 132 - protein, 9 aa, Homo sapiens
QQRSNWPRT

SEQ ID NO: 133 - protein, 9 aa, Homo sapiens
QQRSNWPWT

SEQ ID NO: 134 - protein, 9 aa, Homo sapiens
QQRSNWPYT

SEQ ID NO: 135 - protein, 10 aa, Homo sapiens
QQRSNWPPFT

SEQ ID NO: 136 - protein, 10 aa, Homo sapiens
QQRSNWPPLT

SEQ ID NO: 137 - protein, 10 aa, Homo sapiens
QQRSNWPPIT

SEQ ID NO: 138 - protein, 10 aa, Homo sapiens
QQRSNWPPRT

SEQ ID NO: 139 - protein, 10 aa, Homo sapiens
QQRSNWPPWT

SEQ ID NO: 140 - protein, 10 aa, Homo sapiens
QQRSNWPPYT

SEQ ID NO: 141 - protein, 8 aa, Homo sapiens
QQYNNWPT

SEQ ID NO: 142 - protein, 8 aa, Homo sapiens
QQYNNWFT

SEQ ID NO: 143 - protein, 8 aa, Homo sapiens
QQYNNWLT

SEQ ID NO: 144 - protein, 8 aa, Homo sapiens
QQYNNWIT

SEQ ID NO: 145 - protein, 8 aa, Homo sapiens
QQYNNWRT

SEQ ID NO: 146 - protein, 8 aa, Homo sapiens
QQYNNWWT

SEQ ID NO: 147 - protein, 8 aa, Homo sapiens
QQYNNWYT

SEQ ID NO: 148 - protein, 9 aa, Homo sapiens
QQYNNWPPT

SEQ ID NO: 149 - protein, 9 aa, Homo sapiens
QQYNNWPFT

SEQ ID NO: 150 - protein, 9 aa, Homo sapiens
QQYNNWPLT

SEQ ID NO: 151 - protein, 9 aa, Homo sapiens
QQYNNWPIT

SEQ ID NO: 152 - protein, 9 aa, Homo sapiens
QQYNNWPRT

SEQ ID NO: 153 - protein, 9 aa, Homo sapiens
QQYNNWPWT

SEQ ID NO: 154 - protein, 9 aa, Homo sapiens
QQYNNWPYT

SEQ ID NO: 155 - protein, 10 aa, Homo sapiens
QQYNNWPPFT

SEQ ID NO: 156 - protein, 10 aa, Homo sapiens
QQYNNWPPLT

SEQ ID NO: 157 - protein, 10 aa, Homo sapiens
QQYNNWPPIT

SEQ ID NO: 158 - protein, 10 aa, Homo sapiens
QQYNNWPPRT

SEQ ID NO: 159 - protein, 10 aa, Homo sapiens [sequence omitted]

SEQ ID NO: 160 - protein, 10 aa, Homo sapiens
QQYNNWPPYT

SEQ ID NO: 161 - protein, 8 aa, Homo sapiens
QQYGSSPT

SEQ ID NO: 162 - protein, 8 aa, Homo sapiens
QQYGSSFT

SEQ ID NO: 163 - protein, 8 aa, Homo sapiens
QQYGSSLT

SEQ ID NO: 164 - protein, 8 aa, Homo sapiens
QQYGSSIT

SEQ ID NO: 165 - protein, 8 aa, Homo sapiens
QQYGSSRT

SEQ ID NO: 166 - protein, 8 aa, Homo sapiens
QQYGSSWT

SEQ ID NO: 167 - protein, 8 aa, Homo sapiens
QQYGSSYT

SEQ ID NO: 168 - protein, 9 aa, Homo sapiens
QQYGSSPPT

SEQ ID NO: 169 - protein, 9 aa, Homo sapiens
QQYGSSPFT

SEQ ID NO: 170 - protein, 9 aa, Homo sapiens
QQYGSSPLT

SEQ ID NO: 171 - protein, 9 aa, Homo sapiens
QQYGSSPIT

SEQ ID NO: 172 - protein, 9 aa, Homo sapiens
QQYGSSPRT

SEQ ID NO: 173 - protein, 9 aa, Homo sapiens
QQYGSSPWT

SEQ ID NO: 174 - protein, 9 aa, Homo sapiens
QQYGSSPYT

SEQ ID NO: 175 - protein, 10 aa, Homo sapiens
QQYGSSPPFT

SEQ ID NO: 176 - protein, 10 aa, Homo sapiens
QQYGSSPPLT

SEQ ID NO: 177 - protein, 10 aa, Homo sapiens
QQYGSSPPIT

SEQ ID NO: 178 - protein, 10 aa, Homo sapiens
QQYGSSPPRT

SEQ ID NO: 179 - protein, 10 aa, Homo sapiens
QQYGSSPPWT

SEQ ID NO: 180 - protein, 10 aa, Homo sapiens
QQYGSSPPYT

SEQ ID NO: 181 - protein, 88 aa, Homo sapiens
DIQMTQSPSSLSASVGDRVTITCRASQSISSYLNWYQQKPGKAPKLLIYAASSLQSGVPSRFSGSGSGTDFTLTISSLQPEDFATYYC

SEQ ID NO: 182 - protein, 88 aa, Homo sapiens
DIQMTQSPSSLSASVGDRVTITCRASQSINSYLNWYQQKPGKAPKLLIYAASSLQSGVPSRFSGSGSGTDFTLTISSLQPEDFATYYC

SEQ ID NO: 183 - protein, 88 aa, Homo sapiens
DIQMTQSPSSLSASVGDRVTITCRASQSIDSYLNWYQQKPGKAPKLLIYAASSLQSGVPSRFSGSGSGTDFTLTISSLQPEDFATYYC

SEQ ID NO: 184 - protein, 88 aa, Homo sapiens
DIQMTQSPSSLSASVGDRVTITCRASQSISRYLNWYQQKPGKAPKLLIYAASSLQSGVPSRFSGSGSGTDFTLTISSLQPEDFATYYC

SEQ ID NO: 185 - protein, 88 aa, Homo sapiens
DIQMTQSPSSLSASVGDRVTITCRASQSISSYLNWYQQKPGKAPKLLIYGASSLQSGVPSRFSGSGSGTDFTLTISSLQPEDFATYYC

SEQ ID NO: 186 - protein, 88 aa, Homo sapiens
DIQMTQSPSSLSASVGDRVTITCRASQSISSYLNWYQQKPGKAPKLLIYSASSLQSGVPSRFSGSGSGTDFTLTISSLQPEDFATYYC

SEQ ID NO: 187 - protein, 88 aa, Homo sapiens
DIQMTQSPSSLSASVGDRVTITCRASQSISSYLNWYQQKPGKAPKLLIYAASNLQSGVPSRFSGSGSGTDFTLTISSLQPEDFATYYC

SEQ ID NO: 188 - protein, 88 aa, Homo sapiens
DIQLTQSPSSLSASVGDRVTITCRASQSISSYLNWYQQKPGKAPKLLIYAASSLQSGVPSRFSGSGSGTDFTLTISSLQPEDFATYYC

SEQ ID NO: 189 - protein, 88 aa, Homo sapiens
DIQLTQSPSSLSASVGDRVTITCRASQSINSYLNWYQQKPGKAPKLLIYAASSLQSGVPSRFSGSGSGTDFTLTISSLQPEDFATYYC

SEQ ID NO: 190 - protein, 88 aa, Homo sapiens
DIQLTQSPSSLSASVGDRVTITCRASQSIDSYLNWYQQKPGKAPKLLIYAASSLQSGVPSRFSGSGSGTDFTLTISSLQPEDFATYYC

SEQ ID NO: 191 - protein, 88 aa, Homo sapiens
DIQLTQSPSSLSASVGDRVTITCRASQSISSFLNWYQQKPGKAPKLLIYAASSLQSGVPSRFSGSGSGTDFTLTISSLQPEDFATYYC

SEQ ID NO: 192 - protein, 88 aa, Homo sapiens
DIQLTQSPSSLSASVGDRVTITCRASQSISSYLNWYQQKPGKAPKLLIYSASSLQSGVPSRFSGSGSGTDFTLTISSLQPEDFATYYC

SEQ ID NO: 193 - protein, 88 aa, Homo sapiens
DIQLTQSPSSLSASVGDRVTITCRASQSISSYLNWYQQKPGKAPKLLIYAASNLQSGVPSRFSGSGSGTDFTLTISSLQPEDFATYYC

SEQ ID NO: 194 - protein, 88 aa, Homo sapiens
DIQMTQSPSSLSASVGDRVTITCRASQSISSYLNWYQQKPGKAPKLLISAASSLQSGVPSRFSGSGSGTDFTLTISSLQPEDFATYYC

SEQ ID NO: 195 - protein, 88 aa, Homo sapiens
DIQMTQSPSSLSASVGDRVTITCRASQSISRYLNWYQQKPGKAPKLLISAASSLQSGVPSRFSGSGSGTDFTLTISSLQPEDFATYYC

SEQ ID NO: 196 - protein, 88 aa, Homo sapiens
DIQMTQSPSSLSASVGDRVTITCRASQSISIYLNWYQQKPGKAPKLLISAASSLQSGVPSRFSGSGSGTDFTLTISSLQPEDFATYYC

SEQ ID NO: 197 - protein, 88 aa, Homo sapiens
DIQMTQSPSSLSASVGDRVTITCRASQSISSFLNWYQQKPGKAPKLLISAASSLQSGVPSRFSGSGSGTDFTLTISSLQPEDFATYYC

SEQ ID NO: 198 - protein, 88 aa, Homo sapiens
DIQMTQSPSTLSASVGDRVTITCRASQSISSWLAWYQQKPGKAPKLLIYDASSLESGVPSRFSGSGSGTEFTLTISSLQPDDFATYYC

SEQ ID NO: 199 - protein, 88 aa, Homo sapiens
DIQMTQSPSTLSASVGDRVTITCRASQGISSWLAWYQQKPGKAPKLLIYDASSLESGVPSRFSGSGSGTEFTLTISSLQPDDFATYYC

SEQ ID NO: 200 - protein, 88 aa, Homo sapiens
DIQMTQSPSTLSASVGDRVTITCRASQSISSWLAWYQQKPGKAPKLLIYEASSLESGVPSRFSGSGSGTEFTLTISSLQPDDFATYYC

SEQ ID NO: 201 - protein, 88 aa, Homo sapiens
DIQMTQSPSTLSASVGDRVTITCRASQSISSWLAWYQQKPGKAPKLLIYKASSLESGVPSRFSGSGSGTEFTLTISSLQPDDFATYYC

SEQ ID NO: 202 - protein, 88 aa, Homo sapiens
DIQMTQSPSTLSASVGDRVTITCRASQAISSWLAWYQQKPGKAPKLLIYKASSLESGVPSRFSGSGSGTEFTLTISSLQPDDFATYYC

SEQ ID NO: 203 - protein, 88 aa, Homo sapiens
DIQMTQSPSTLSASVGDRVTITCRASQSINSWLAWYQQKPGKAPKLLIYKASSLESGVPSRFSGSGSGTEFTLTISSLQPDDFATYYC

SEQ ID NO: 204 - protein, 88 aa, Homo sapiens
DIQMTQSPSTLSASVGDRVTITCRASQSIGSWLAWYQQKPGKAPKLLIYKASSLESGVPSRFSGSGSGTEFTLTISSLQPDDFATYYC

SEQ ID NO: 205 - protein, 88 aa, Homo sapiens
DIQLTQSPSTLSASVGDRVTITCRASQSISSWLAWYQQKPGKAPKLLIYDASSLESGVPSRFSGSGSGTEFTLTISSLQPDDFATYYC

SEQ ID NO: 206 - protein, 88 aa, Homo sapiens
DIQLTQSPSTLSASVGDRVTITCRASQGISSWLAWYQQKPGKAPKLLIYDASSLESGVPSRFSGSGSGTEFTLTISSLQPDDFATYYC

SEQ ID NO: 207 - protein, 88 aa, Homo sapiens
DIQLTQSPSTLSASVGDRVTITCRASQAISSWLAWYQQKPGKAPKLLIYDASSLESGVPSRFSGSGSGTEFTLTISSLQPDDFATYYC

SEQ ID NO: 208 - protein, 88 aa, Homo sapiens
DIQLTQSPSTLSASVGDRVTITCRASQSIGSWLAWYQQKPGKAPKLLIYDASSLESGVPSRFSGSGSGTEFTLTISSLQPDDFATYYC

SEQ ID NO: 209 - protein, 88 aa, Homo sapiens
DIQMTQSPSTLSASVGDRVTITCRASQSISSWLAWYQQKPGKAPKLLISDASSLESGVPSRFSGSGSGTEFTLTISSLQPDDFATYYC

SEQ ID NO: 210 - protein, 88 aa, Homo sapiens
DIQMTQSPSTLSASVGDRVTITCRASQSINSWLAWYQQKPGKAPKLLISDASSLESGVPSRFSGSGSGTEFTLTISSLQPDDFATYYC

SEQ ID NO: 211 - protein, 88 aa, Homo sapiens
DIQLTQSPSTLSASVGDRVTITCRASQSIGSWLAWYQQKPGKAPKLLIYKASSLESGVPSRFSGSGSGTEFTLTISSLQPDDFATYYC

SEQ ID NO: 212 - protein, 88 aa, Homo sapiens
DIQMTQSPSTLSASVGDRVTITCRASQSISSWLAWYQQKPGKAPKLLISKASSLESGVPSRFSGSGSGTEFTLTISSLQPDDFATYYC

SEQ ID NO: 213 - protein, 88 aa, Homo sapiens
DIQMTQSPSSVSASVGDRVTITCRASQGISSWLAWYQQKPGKAPKLLIYAASSLQSGVPSRFSGSGSGTDFTLTISSLQPEDFATYYC

SEQ ID NO: 214 - protein, 88 aa, Homo sapiens
DIQMTQSPSSVSASVGDRVTITCRASQGIGSWLAWYQQKPGKAPKLLIYAASSLQSGVPSRFSGSGSGTDFTLTISSLQPEDFATYYC

SEQ ID NO: 215 - protein, 88 aa, Homo sapiens
DIQMTQSPSSVSASVGDRVTITCRASQGIDSWLAWYQQKPGKAPKLLIYAASSLQSGVPSRFSGSGSGTDFTLTISSLQPEDFATYYC

SEQ ID NO: 216 - protein, 88 aa, Homo sapiens
DIQMTQSPSSVSASVGDRVTITCRASQGISRWLAWYQQKPGKAPKLLIYAASSLQSGVPSRFSGSGSGTDFTLTISSLQPEDFATYYC

SEQ ID NO: 217 - protein, 88 aa, Homo sapiens
DIQMTQSPSSVSASVGDRVTITCRASQGISSWLAWYQQKPGKAPKLLIYGASSLQSGVPSRFSGSGSGTDFTLTISSLQPEDFATYYC

SEQ ID NO: 218 - protein, 88 aa, Homo sapiens
DIQMTQSPSSVSASVGDRVTITCRASQGISSWLAWYQQKPGKAPKLLIYSASSLQSGVPSRFSGSGSGTDFTLTISSLQPEDFATYYC

SEQ ID NO: 219 - protein, 88 aa, Homo sapiens
DIQMTQSPSSVSASVGDRVTITCRASQGISSWLAWYQQKPGKAPKLLIYAASNLQSGVPSRFSGSGSGTDFTLTISSLQPEDFATYYC

SEQ ID NO: 220 - protein, 88 aa, Homo sapiens
DIQLTQSPSSVSASVGDRVTITCRASQGISSWLAWYQQKPGKAPKLLIYAASSLQSGVPSRFSGSGSGTDFTLTISSLQPEDFATYYC

SEQ ID NO: 221 - protein, 88 aa, Homo sapiens
DIQLTQSPSSVSASVGDRVTITCRASQDISSWLAWYQQKPGKAPKLLIYAASSLQSGVPSRFSGSGSGTDFTLTISSLQPEDFATYYC

SEQ ID NO: 222 - protein, 88 aa, Homo sapiens
DIQLTQSPSSVSASVGDRVTITCRASQGISRWLAWYQQKPGKAPKLLIYAASSLQSGVPSRFSGSGSGTDFTLTISSLQPEDFATYYC

SEQ ID NO: 223 - protein, 88 aa, Homo sapiens
DIQLTQSPSSVSASVGDRVTITCRASQGISSWLAWYQQKPGKAPKLLIYGASSLQSGVPSRFSGSGSGTDFTLTISSLQPEDFATYYC

SEQ ID NO: 224 - protein, 88 aa, Homo sapiens
DIQLTQSPSSVSASVGDRVTITCRASQGISSWLAWYQQKPGKAPKLLIYSASSLQSGVPSRFSGSGSGTDFTLTISSLQPEDFATYYC

SEQ ID NO: 225 - protein, 88 aa, Homo sapiens
DIQLTQSPSSVSASVGDRVTITCRASQGISSWLAWYQQKPGKAPKLLIYAASNLQSGVPSRFSGSGSGTDFTLTISSLQPEDFATYYC

SEQ ID NO: 226 - protein, 88 aa, Homo sapiens
DIQMTQSPSSVSASVGDRVTITCRASQGISSWLAWYQQKPGKAPKLLISAASSLQSGVPSRFSGSGSGTDFTLTISSLQPEDFATYYC

SEQ ID NO: 227 - protein, 88 aa, Homo sapiens
DIQMTQSPSSVSASVGDRVTITCRASQDISSWLAWYQQKPGKAPKLLISAASSLQSGVPSRFSGSGSGTDFTLTISSLQPEDFATYYC

SEQ ID NO: 228 - protein, 88 aa, Homo sapiens
DIQMTQSPSSVSASVGDRVTITCRASQGIDSWLAWYQQKPGKAPKLLISAASSLQSGVPSRFSGSGSGTDFTLTISSLQPEDFATYYC

SEQ ID NO: 229 - protein, 88 aa, Homo sapiens
DIQMTQSPSSVSASVGDRVTITCRASQGISRWLAWYQQKPGKAPKLLISAASSLQSGVPSRFSGSGSGTDFTLTISSLQPEDFATYYC

SEQ ID NO: 230 - protein, 88 aa, Homo sapiens
DIQMTQSPSSLSASVGDRVTITCQASQDISNYLNWYQQKPGKAPKLLIYDASNLETGVPSRFSGSGSGTDFTFTISSLQPEDIATYYC

SEQ ID NO: 231 - protein, 88 aa, Homo sapiens
DIQMTQSPSSLSASVGDRVTITCQASQDITNYLNWYQQKPGKAPKLLIYDASNLETGVPSRFSGSGSGTDFTFTISSLQPEDIATYYC

SEQ ID NO: 232 - protein, 88 aa, Homo sapiens
DIQMTQSPSSLSASVGDRVTITCQASQDIANYLNWYQQKPGKAPKLLIYDASNLETGVPSRFSGSGSGTDFTFTISSLQPEDIATYYC

SEQ ID NO: 233 - protein, 88 aa, Homo sapiens
DIQMTQSPSSLSASVGDRVTITCQASQDISNYLNWYQQKPGKAPKLLIYDASNLATGVPSRFSGSGSGTDFTFTISSLQPEDIATYYC

SEQ ID NO: 234 - protein, 88 aa, Homo sapiens
DIQLTQSPSSLSASVGDRVTITCQASQDISNYLNWYQQKPGKAPKLLIYDASNLETGVPSRFSGSGSGTDFTFTISSLQPEDIATYYC

SEQ ID NO: 235 - protein, 88 aa, Homo sapiens
DIQLTQSPSSLSASVGDRVTITCQASQDISNSLNWYQQKPGKAPKLLIYDASNLETGVPSRFSGSGSGTDFTFTISSLQPEDIATYYC

SEQ ID NO: 236 - protein, 88 aa, Homo sapiens
DIQLTQSPSSLSASVGDRVTITCQASQDISNFLNWYQQKPGKAPKLLIYDASNLETGVPSRFSGSGSGTDFTFTISSLQPEDIATYYC

SEQ ID NO: 237 - protein, 88 aa, Homo sapiens
DIQLTQSPSSLSASVGDRVTITCQASQDISNYLNWYQQKPGKAPKLLIYDASNLQTGVPSRFSGSGSGTDFTFTISSLQPEDIATYYC

SEQ ID NO: 238 - protein, 88 aa, Homo sapiens
DIQMTQSPSSLSASVGDRVTITCQASQDISNYLNWYQQKPGKAPKLLIYDASNLETGVPSRFSGSRSGTDFTFTISSLQPEDIATYYC

SEQ ID NO: 239 - protein, 88 aa, Homo sapiens
DIQMTQSPSSLSASVGDRVTITCQASQDITNYLNWYQQKPGKAPKLLIYDASNLETGVPSRFSGSRSGTDFTFTISSLQPEDIATYYC

SEQ ID NO: 240 - protein, 88 aa, Homo sapiens
DIQMTQSPSSLSASVGDRVTITCQASQDIANYLNWYQQKPGKAPKLLIYDASNLETGVPSRFSGSRSGTDFTFTISSLQPEDIATYYC

SEQ ID NO: 241 - protein, 88 aa, Homo sapiens
DIQMTQSPSSLSASVGDRVTITCQASQDISNSLNWYQQKPGKAPKLLIYDASNLETGVPSRFSGSRSGTDFTFTISSLQPEDIATYYC

SEQ ID NO: 242 - protein, 88 aa, Homo sapiens
DIQMTQSPSSLSASVGDRVTITCQASQDISNFLNWYQQKPGKAPKLLIYDASNLETGVPSRFSGSRSGTDFTFTISSLQPEDIATYYC

SEQ ID NO: 243 - protein, 93 aa, Homo sapiens
DIVMTQSPLSLPVTPGEPASISCRSSQSLLHSNGYNYLDWYLQKPGQSPQLLIYLGSNRASGVPDRFSGSGSGTDFTLKISRVEAEDVGVYYC

SEQ ID NO: 244 - protein, 93 aa, Homo sapiens
DIVMTQSPLSLPVTPGEPASISCRSSQSLLYSNGYNYLDWYLQKPGQSPQLLIYLGSNRASGVPDRFSGSGSGTDFTLKISRVEAEDVGVYYC

SEQ ID NO: 245 - protein, 93 aa, Homo sapiens
DIVMTQSPLSLPVTPGEPASISCRSSQSLLHRNGYNYLDWYLQKPGQSPQLLIYLGSNRASGVPDRFSGSGSGTDFTLKISRVEAEDVGVYYC

SEQ ID NO: 246 - protein, 93 aa, Homo sapiens
DIVMTQSPLSLPVTPGEPASISCRSSQSLLHTNGYNYLDWYLQKPGQSPQLLIYLGSNRASGVPDRFSGSGSGTDFTLKISRVEAEDVGVYYC

SEQ ID NO: 247 - protein, 93 aa, Homo sapiens
DIVMTQSPLSLPVTPGEPASISCRSSQSLLHSNGNNYLDWYLQKPGQSPQLLIYLGSNRASGVPDRFSGSGSGTDFTLKISRVEAEDVGVYYC

SEQ ID NO: 248 - protein, 93 aa, Homo sapiens
DIVMTQSPLSLPVTPGEPASISCRSSQSLLHSNGYNYLDWYLQKPGQSPQLLIYLASNRASGVPDRFSGSGSGTDFTLKISRVEAEDVGVYYC

SEQ ID NO: 249 - protein, 93 aa, Homo sapiens
DIVMTQSPLSLPVTPGEPASISCRSSQSLLHSNGYNYLDWYLQKPGQSPQLLIYLGSHRASGVPDRFSGSGSGTDFTLKISRVEAEDVGVYYC

SEQ ID NO: 250 - protein, 93 aa, Homo sapiens
DIVMTQSPLSLPVTPGEPASISCRSSQSLLHSNGYNYLDWYLQKPGQSPQVLIYLGSNRASGVPDRFSGSGSGTDFTLKISRVEAEDVGVYYC

SEQ ID NO: 251 - protein, 93 aa, Homo sapiens
DIVMTQSPLSLPVTPGEPASISCRSSQSLLYSNGYNYLDWYLQKPGQSPQVLIYLGSNRASGVPDRFSGSGSGTDFTLKISRVEAEDVGVYYC

SEQ ID NO: 252 - protein, 93 aa, Homo sapiens
DIVMTQSPLSLPVTPGEPASISCRSSQSLLHSNGYNYLDWYLQKPGQSPQVLIYLASNRASGVPDRFSGSGSGTDFTLKISRVEAEDVGVYYC

SEQ ID NO: 253 - protein, 93 aa, Homo sapiens
DIVMTQSPLSLPVTPGEPASISCRSSQSLLHSNGYNYLDWYLQKPGQSPQVLIYLGSSRASGVPDRFSGSGSGTDFTLKISRVEAEDVGVYYC

SEQ ID NO: 254 - protein, 93 aa, Homo sapiens
DIVMTQSPLSLPVTPGEPASISCRSSQSLLHSNGYNYLDWYLQKPGQSPQLLIFLGSNRASGVPDRFSGSGSGTDFTLKISRVEAEDVGVYYC

SEQ ID NO: 255 - protein, 93 aa, Homo sapiens
DIVMTQSPLSLPVTPGEPASISCRSSQSLLHSNGNNYLDWYLQKPGQSPQLLIFLGSNRASGVPDRFSGSGSGTDFTLKISRVEAEDVGVYYC

SEQ ID NO: 256 - protein, 88 aa, Homo sapiens
EIVLTQSPATLSLSPGERATLSCRASQSVSSYLAWYQQKPGQAPRLLIYDASNRATGIPARFSGSGSGTDFTLTISSLEPEDFAVYYC

SEQ ID NO: 257 - protein, 88 aa, Homo sapiens
EIVLTQSPATLSLSPGERATLSCRASQSVSRYLAWYQQKPGQAPRLLIYDASNRATGIPARFSGSGSGTDFTLTISSLEPEDFAVYYC

SEQ ID NO: 258 - protein, 88 aa, Homo sapiens
EIVLTQSPATLSLSPGERATLSCRASQSVSNYLAWYQQKPGQAPRLLIYDASNRATGIPARFSGSGSGTDFTLTISSLEPEDFAVYYC

SEQ ID NO: 259 - protein, 88 aa, Homo sapiens
EIVLTQSPATLSLSPGERATLSCRASQSVSSYLAWYQQKPGQAPRLLIYDSSNRATGIPARFSGSGSGTDFTLTISSLEPEDFAVYYC

SEQ ID NO: 260 - protein, 88 aa, Homo sapiens
EIVLTQSPATLSLSPGERATLSCRASQSVSSYLAWYQQKPGQAPRLLIYDTSNRATGIPARFSGSGSGTDFTLTISSLEPEDFAVYYC

SEQ ID NO: 261 - protein, 88 aa, Homo sapiens
EIVLTQSPATLSLSPGERATLSCRASQSVSSYLAWYQQKPGQAPRLLIYDASKRATGIPARFSGSGSGTDFTLTISSLEPEDFAVYYC

SEQ ID NO: 262 - protein, 88 aa, Homo sapiens
EIVMTQSPATLSLSPGERATLSCRASQSVSSYLAWYQQKPGQAPRLLIYDASNRATGIPARFSGSGSGTDFTLTISSLEPEDFAVYYC

SEQ ID NO: 263 - protein, 88 aa, Homo sapiens
EIVMTQSPATLSLSPGERATLSCRASQSVSNYLAWYQQKPGQAPRLLIYDASNRATGIPARFSGSGSGTDFTLTISSLEPEDFAVYYC

SEQ ID NO: 264 - protein, 88 aa, Homo sapiens
EIVMTQSPATLSLSPGERATLSCRASQSVSSYLAWYQQKPGQAPRLLIYDSSNRATGIPARFSGSGSGTDFTLTISSLEPEDFAVYYC

SEQ ID NO: 265 - protein, 88 aa, Homo sapiens
EIVMTQSPATLSLSPGERATLSCRASQSVSSYLAWYQQKPGQAPRLLIYDTSNRATGIPARFSGSGSGTDFTLTISSLEPEDFAVYYC

SEQ ID NO: 266 - protein, 88 aa, Homo sapiens
EIVMTQSPATLSLSPGERATLSCRASQSVSSYLAWYQQKPGQAPRLLIYDASKRATGIPARFSGSGSGTDFTLTISSLEPEDFAVYYC

SEQ ID NO: 267 - protein, 88 aa, Homo sapiens
EIVLTQSPATLSLSPGERATLSCRASQSVSSYLAWFQQKPGQAPRLLIYDASNRATGIPARFSGSGSGTDFTLTISSLEPEDFAVYYC

SEQ ID NO: 268 - protein, 88 aa, Homo sapiens
EIVLTQSPATLSLSPGERATLSCRASQSISSYLAWFQQKPGQAPRLLIYDASNRATGIPARFSGSGSGTDFTLTISSLEPEDFAVYYC

SEQ ID NO: 269 - protein, 88 aa, Homo sapiens
EIVLTQSPATLSLSPGERATLSCRASQSVSSYLAWFQQKPGQAPRLLIYDSSNRATGIPARFSGSGSGTDFTLTISSLEPEDFAVYYC

SEQ ID NO: 270 - protein, 88 aa, Homo sapiens
EIVLTQSPATLSLSPGERATLSCRASQSVSSYLAWFQQKPGQAPRLLIYDTSNRATGIPARFSGSGSGTDFTLTISSLEPEDFAVYYC

SEQ ID NO: 271 - protein, 88 aa, Homo sapiens
EIVMTQSPATLSVSPGERATLSCRASQSVSSNLAWYQQKPGQAPRLLIYGASTRATGIPARFSGSGSGTEFTLTISSLQSEDFAVYYC

SEQ ID NO: 272 - protein, 88 aa, Homo sapiens
EIVMTQSPATLSVSPGERATLSCRASQSVGSNLAWYQQKPGQAPRLLIYGASTRATGIPARFSGSGSGTEFTLTISSLQSEDFAVYYC

SEQ ID NO: 273 - protein, 88 aa, Homo sapiens
EIVMTQSPATLSVSPGERATLSCRASQSVSSSLAWYQQKPGQAPRLLIYGASTRATGIPARFSGSGSGTEFTLTISSLQSEDFAVYYC

SEQ ID NO: 274 - protein, 88 aa, Homo sapiens
EIVMTQSPATLSVSPGERATLSCRASQSVSSNLAWYQQKPGQAPRLLIYDASTRATGIPARFSGSGSGTEFTLTISSLQSEDFAVYYC

SEQ ID NO: 275 - protein, 88 aa, Homo sapiens
EIVMTQSPATLSVSPGERATLSCRASQSVSSNLAWYQQKPGQAPRLLIYSASTRATGIPARFSGSGSGTEFTLTISSLQSEDFAVYYC

SEQ ID NO: 276 - protein, 88 aa, Homo sapiens
EIVLTQSPATLSVSPGERATLSCRASQSVSSNLAWYQQKPGQAPRLLIYGASTRATGIPARFSGSGSGTEFTLTISSLQSEDFAVYYC

SEQ ID NO: 277 - protein, 88 aa, Homo sapiens
EIVLTQSPATLSVSPGERATLSCRASQSVGSNLAWYQQKPGQAPRLLIYGASTRATGIPARFSGSGSGTEFTLTISSLQSEDFAVYYC

SEQ ID NO: 278 - protein, 88 aa, Homo sapiens
EIVLTQSPATLSVSPGERATLSCRASQSVSTNLAWYQQKPGQAPRLLIYGASTRATGIPARFSGSGSGTEFTLTISSLQSEDFAVYYC

SEQ ID NO: 279 - protein, 88 aa, Homo sapiens
EIVLTQSPATLSVSPGERATLSCRASQSVSSDLAWYQQKPGQAPRLLIYGASTRATGIPARFSGSGSGTEFTLTISSLQSEDFAVYYC

SEQ ID NO: 280 - protein, 88 aa, Homo sapiens
EIVMTQSPATLSVSPGERATLSCRASQSVSSNLAWYQQKPGQAPRLLIFGASTRATGIPARFSGSGSGTEFTLTISSLQSEDFAVYYC

SEQ ID NO: 281 - protein, 88 aa, Homo sapiens
EIVMTQSPATLSVSPGERATLSCRASQSVGSNLAWYQQKPGQAPRLLIFGASTRATGIPARFSGSGSGTEFTLTISSLQSEDFAVYYC

SEQ ID NO: 282 - protein, 88 aa, Homo sapiens
EIVMTQSPATLSVSPGERATLSCRASQSVSSDLAWYQQKPGQAPRLLIFGASTRATGIPARFSGSGSGTEFTLTISSLQSEDFAVYYC

SEQ ID NO: 283 - protein, 88 aa, Homo sapiens
EIVMTQSPATLSVSPGERATLSCRASQSVSSSLAWYQQKPGQAPRLLIFGASTRATGIPARFSGSGSGTEFTLTISSLQSEDFAVYYC

SEQ ID NO: 284 - protein, 89 aa, Homo sapiens
EIVLTQSPGTLSLSPGERATLSCRASQSVSSSYLAWYQQKPGQAPRLLIYGASSRATGIPDRFSGSGSGTDFTLTISRLEPEDFAVYYC

SEQ ID NO: 285 - protein, 89 aa, Homo sapiens
EIVLTQSPGTLSLSPGERATLSCRASQSVRSSYLAWYQQKPGQAPRLLIYGASSRATGIPDRFSGSGSGTDFTLTISRLEPEDFAVYYC

SEQ ID NO: 286 - protein, 89 aa, Homo sapiens
EIVLTQSPGTLSLSPGERATLSCRASQSVSSDYLAWYQQKPGQAPRLLIYGASSRATGIPDRFSGSGSGTDFTLTISRLEPEDFAVYYC

SEQ ID NO: 287 - protein, 89 aa, Homo sapiens
EIVLTQSPGTLSLSPGERATLSCRASQSVSSSYLAWYQQKPGQAPRLLIYGASNRATGIPDRFSGSGSGTDFTLTISRLEPEDFAVYYC

SEQ ID NO: 288 - protein, 89 aa, Homo sapiens
EIVLTQSPGTLSLSPGERATLSCRASQSVSSSYLAWYQQKPGQAPRLLIYGASRRATGIPDRFSGSGSGTDFTLTISRLEPEDFAVYYC

SEQ ID NO: 289 - protein, 89 aa, Homo sapiens
EIVMTQSPGTLSLSPGERATLSCRASQSVSSSYLAWYQQKPGQAPRLLIYGASSRATGIPDRFSGSGSGTDFTLTISRLEPEDFAVYYC

SEQ ID NO: 290 - protein, 89 aa, Homo sapiens
EIVMTQSPGTLSLSPGERATLSCRASQSVSSSYLAWYQQKPGQAPRLLIYGASNRATGIPDRFSGSGSGTDFTLTISRLEPEDFAVYYC

SEQ ID NO: 291 - protein, 89 aa, Homo sapiens
EIVLTQSPGTLSLSPGERATLSCRASQSVSSSYLAWYQQKPGQAPRLLISGASSRATGIPDRFSGSGSGTDFTLTISRLEPEDFAVYYC

SEQ ID NO: 292 - protein, 89 aa, Homo sapiens
EIVLTQSPGTLSLSPGERATLSCRASQSVSSNYLAWYQQKPGQAPRLLISGASSRATGIPDRFSGSGSGTDFTLTISRLEPEDFAVYYC

SEQ ID NO: 293 - protein, 94 aa, Homo sapiens
DIVMTQSPDSLAVSLGERATINCKSSQSVLYSSNNKNYLAWYQQKPGQPPKLLIYWASTRESGVPDRFSGSGSGTDFTLTISSLQAEDVAVYYC

SEQ ID NO: 294 - protein, 94 aa, Homo sapiens
DIVMTQSPDSLAVSLGERATINCKSSQSLLYSSNNKNYLAWYQQKPGQPPKLLIYWASTRESGVPDRFSGSGSGTDFTLTISSLQAEDVAVYYC

SEQ ID NO: 295 - protein, 94 aa, Homo sapiens
DIVMTQSPDSLAVSLGERATINCKSSQSILYSSNNKNYLAWYQQKPGQPPKLLIYWASTRESGVPDRFSGSGSGTDFTLTISSLQAEDVAVYYC

SEQ ID NO: 296 - protein, 94 aa, Homo sapiens
DIVMTQSPDSLAVSLGERATINCKSSQSVLHSSNNKNYLAWYQQKPGQPPKLLIYWASTRESGVPDRFSGSGSGTDFTLTISSLQAEDVAVYYC

SEQ ID NO: 297 - protein, 94 aa, Homo sapiens
DIVMTQSPDSLAVSLGERATINCKSSQSVLFSSNNKNYLAWYQQKPGQPPKLLIYWASTRESGVPDRFSGSGSGTDFTLTISSLQAEDVAVYYC

SEQ ID NO: 298 - protein, 94 aa, Homo sapiens
DIVMTQSPDSLAVSLGERATINCKSSQSVLYTSNNKNYLAWYQQKPGQPPKLLIYWASTRESGVPDRFSGSGSGTDFTLTISSLQAEDVAVYYC

SEQ ID NO: 299 - protein, 94 aa, Homo sapiens
DIVMTQSPDSLAVSLGERATINCKSSQSVLYSSNNKNYLAWYQQKPGQPPKLLIYWASSRESGVPDRFSGSGSGTDFTLTISSLQAEDVAVYYC

SEQ ID NO: 300 - protein, 94 aa, Homo sapiens
DIVLTQSPDSLAVSLGERATINCKSSQSVLYSSNNKNYLAWYQQKPGQPPKLLIYWASTRESGVPDRFSGSGSGTDFTLTISSLQAEDVAVYYC

SEQ ID NO: 301 - protein, 94 aa, Homo sapiens
DIVLTQSPDSLAVSLGERATINCKSSQSVLHSSNNKNYLAWYQQKPGQPPKLLIYWASTRESGVPDRFSGSGSGTDFTLTISSLQAEDVAVYYC

SEQ ID NO: 302 - protein, 94 aa, Homo sapiens
DIVLTQSPDSLAVSLGERATINCKSSQSVLYSSNNKNYLAWYQQKPGQPPKLLIYWASSRESGVPDRFSGSGSGTDFTLTISSLQAEDVAVYYC

SEQ ID NO: 303 - protein, 94 aa, Homo sapiens
DIVMTQSPDSLAVSLGERATINCKSSQSVLYSSNNKNYLAWYQQKPGQPPKLLISWASTRESGVPDRFSGSGSGTDFTLTISSLQAEDVAVYYC

SEQ ID NO: 304 - protein, 94 aa, Homo sapiens
DIVMTQSPDSLAVSLGERATINCKSSQSVLHSSNNKNYLAWYQQKPGQPPKLLISWASTRESGVPDRFSGSGSGTDFTLTISSLQAEDVAVYYC

SEQ ID NO: 305 - DNA, 27 bp, Artificial Sequence
  Description of Artificial Sequence: Synthetic oligonucleotide
swmswmagctacagtactccttwcact

SEQ ID NO: 306 - DNA, 27 bp, Artificial Sequence
  Description of Artificial Sequence: Synthetic oligonucleotide
  modified_base (8)..(8): a, c, t or g
swmcaavnatacagtactccttwcact

SEQ ID NO: 307 - DNA, 27 bp, Artificial Sequence
  Description of Artificial Sequence: Synthetic oligonucleotide
swmcaaagcbhcagtactccttwcact

SEQ ID NO: 308 - DNA, 27 bp, Artificial Sequence
  Description of Artificial Sequence: Synthetic oligonucleotide
  modified_base (13)..(13): a, c, t or g
swmcaaagctacnhcactccttwcact

SEQ ID NO: 309 - DNA, 27 bp, Artificial Sequence
  Description of Artificial Sequence: Synthetic oligonucleotide
swmcaaagctacagtbhcccttwcact

SEQ ID NO: 310 - DNA, 27 bp, Artificial Sequence
  Description of Artificial Sequence: Synthetic oligonucleotide
  modified_base (8)..(8): a, c, t or g
cagswmvnatacagtactccttwcact

SEQ ID NO: 311 - DNA, 27 bp, Artificial Sequence
  Description of Artificial Sequence: Synthetic oligonucleotide
cagswmagcbhcagtactccttwcact

SEQ ID NO: 312 - DNA, 27 bp, Artificial Sequence
  Description of Artificial Sequence: Synthetic oligonucleotide
  modified_base (13)..(13): a, c, t or g
cagswmagctacnhcactccttwcact

SEQ ID NO: 313 - DNA, 27 bp, Artificial Sequence
  Description of Artificial Sequence: Synthetic oligonucleotide
cagswmagctacagtbhcccttwcact

SEQ ID NO: 314 - DNA, 27 bp, Artificial Sequence
  Description of Artificial Sequence: Synthetic oligonucleotide
  modified_base (8)..(8): a, c, t or g
cagcaavnabhcagtactccttwcact

SEQ ID NO: 315 - DNA, 27 bp, Artificial Sequence
  Description of Artificial Sequence: Synthetic oligonucleotide
  modified_base (8)..(8): a, c, t or g
  modified_base (13)..(13): a, c, t or g
cagcaavnatacnhcactccttwcact

SEQ ID NO: 316 - DNA, 27 bp, Artificial Sequence
  Description of Artificial Sequence: Synthetic oligonucleotide
  modified_base (8)..(8): a, c, t or g
cagcaavnatacagtbhcccttwcact

SEQ ID NO: 317 - DNA, 27 bp, Artificial Sequence
  Description of Artificial Sequence: Synthetic oligonucleotide
  modified_base (13)..(13): a, c, t or g
cagcaaagcbhcnhcactccttwcact

SEQ ID NO: 318 - DNA, 27 bp, Artificial Sequence
  Description of Artificial Sequence: Synthetic oligonucleotide
cagcaaagcbhcagtbhcccttwcact

SEQ ID NO: 319 - DNA, 27 bp, Artificial Sequence
  Description of Artificial Sequence: Synthetic oligonucleotide
  modified_base (13)..(13): a, c, t or g
cagcaaagctacnhcbhcccttwcact

SEQ ID NO: 320 - DNA, 27 bp, Artificial Sequence
  Description of Artificial Sequence: Synthetic oligonucleotide
  modified_base (8)..(8): a, c, t or g
  modified_base (13)..(13): a, c, t or g
cagcaavnabhcnhcactccttwcact

SEQ ID NO: 321 - DNA, 27 bp, Artificial Sequence
  Description of Artificial Sequence: Synthetic oligonucleotide
  modified_base (8)..(8): a, c, t or g
cagcaavnabhcagtbhcccttwcact

SEQ ID NO: 322 - DNA, 27 bp, Artificial Sequence
  Description of Artificial Sequence: Synthetic oligonucleotide
  modified_base (8)..(8): a, c, t or g
  modified_base (13)..(13): a, c, t or g
cagcaavnatacnhcbhcccttwcact

SEQ ID NO: 323 - DNA, 27 bp, Artificial Sequence
  Description of Artificial Sequence: Synthetic oligonucleotide
  modified_base (13)..(13): a, c, t or g
cagcaaagcbhcnhcbhcccttwcact

SEQ ID NO: 324 - DNA, 69 bp, Artificial Sequence
  Description of Artificial Sequence: Synthetic oligonucleotide
cctgatgattttgcaacttattactgcswmswmtacaatagttactwcacttttggcggagggaccaag

SEQ ID NO: 325 - DNA, 69 bp, Artificial Sequence
  Description of Artificial Sequence: Synthetic oligonucleotide
cctgatgattttgcaacttattactgccagcagbhcvrmagttactwcacttttggcggagggaccaag

SEQ ID NO: 326 - DNA, 69 bp, Artificial Sequence
  Description of Artificial Sequence: Synthetic oligonucleotide
cctgatgattttgcaacttattactgccagcagbhcaatmbctactwcacttttggcggagggaccaag

SEQ ID NO: 327 - DNA, 69 bp, Artificial Sequence
  Description of Artificial Sequence: Synthetic oligonucleotide
cctgatgattttgcaacttattactgccagcagbhcaatagtywctwcacttttggcggagggaccaag

SEQ ID NO: 328 - DNA, 69 bp, Artificial Sequence
  Description of Artificial Sequence: Synthetic oligonucleotide
cctgatgattttgcaacttattactgccagcagtacvrmmbctactwcacttttggcggagggaccaag

SEQ ID NO: 329 - DNA, 69 bp, Artificial Sequence
  Description of Artificial Sequence: Synthetic oligonucleotide
cctgatgattttgcaacttattactgccagcagtacvrmagtywctwcacttttggcggagggaccaag

SEQ ID NO: 330 - DNA, 69 bp, Artificial Sequence
  Description of Artificial Sequence: Synthetic oligonucleotide
cctgatgattttgcaacttattactgccagcagtacaatmbcywctwcacttttggcggagggaccaag

SEQ ID NO: 331 - DNA, 69 bp, Artificial Sequence
  Description of Artificial Sequence: Synthetic oligonucleotide
cctgatgattttgcaacttattactgcswmcagbhcaatagttactwcacttttggcggagggaccaag

SEQ ID NO: 332 - DNA, 69 bp, Artificial Sequence
  Description of Artificial Sequence: Synthetic oligonucleotide
cctgatgattttgcaacttattactgcswmcagtacvrmagttactwcacttttggcggagggaccaag

SEQ ID NO: 333 - DNA, 69 bp, Artificial Sequence
  Description of Artificial Sequence: Synthetic oligonucleotide
cctgatgattttgcaacttattactgcswmcagtacaatmbctactwcacttttggcggagggaccaag

SEQ ID NO: 334 - DNA, 69 bp, Artificial Sequence
  Description of Artificial Sequence: Synthetic oligonucleotide
cctgatgattttgcaacttattactgcswmcagtacaatagtywctwcacttttggcggagggaccaag

SEQ ID NO: 335 - DNA, 69 bp, Artificial Sequence
  Description of Artificial Sequence: Synthetic oligonucleotide
cctgatgattttgcaacttattactgccagswmbhcaatagttactwcacttttggcggagggaccaag

SEQ ID NO: 336 - DNA, 69 bp, Artificial Sequence
  Description of Artificial Sequence: Synthetic oligonucleotide
cctgatgattttgcaacttattactgccagswmtacvrmagttactwcacttttggcggagggaccaag

SEQ ID NO: 337 - DNA, 69 bp, Artificial Sequence
  Description of Artificial Sequence: Synthetic oligonucleotide
cctgatgattttgcaacttattactgccagswmtacaatmbctactwcacttttggcggagggaccaag

SEQ ID NO: 338 - DNA, 69 bp, Artificial Sequence
  Description of Artificial Sequence: Synthetic oligonucleotide
cctgatgattttgcaacttattactgccagswmtacaatagtywctwcacttttggcggagggaccaag

SEQ ID NO: 339 - DNA, 69 bp, Artificial Sequence
  Description of Artificial Sequence: Synthetic oligonucleotide
cctgatgattttgcaacttattactgcswmswmtacaatagttacmtcacttttggcggagggaccaag

SEQ ID NO: 340 - DNA, 69 bp, Artificial Sequence
  Description of Artificial Sequence: Synthetic oligonucleotide
cctgatgattttgcaacttattactgccagcagbhcvrmagttacmtcacttttggcggagggaccaag

SEQ ID NO: 341 - DNA, 69 bp, Artificial Sequence
  Description of Artificial Sequence: Synthetic oligonucleotide
cctgatgattttgcaacttattactgccagcagbhcaatmbctacmtcacttttggcggagggaccaag

SEQ ID NO: 342 - DNA, 69 bp, Artificial Sequence
  Description of Artificial Sequence: Synthetic oligonucleotide
cctgatgattttgcaacttattactgccagcagbhcaatagtywcmtcacttttggcggagggaccaag

SEQ ID NO: 343 - DNA, 69 bp, Artificial Sequence
  Description of Artificial Sequence: Synthetic oligonucleotide
cctgatgattttgcaacttattactgccagcagtacvrmmbctacmtcacttttggcggagggaccaag

SEQ ID NO: 344 - DNA, 69 bp, Artificial Sequence
  Description of Artificial Sequence: Synthetic oligonucleotide
cctgatgattttgcaacttattactgccagcagtacvrmagtywcmtcacttttggcggagggaccaag

SEQ ID NO: 345 - DNA, 69 bp, Artificial Sequence
  Description of Artificial Sequence: Synthetic oligonucleotide
cctgatgattttgcaacttattactgccagcagtacaatmbcywcmtcacttttggcggagggaccaag

SEQ ID NO: 346 - DNA, 69 bp, Artificial Sequence
  Description of Artificial Sequence: Synthetic oligonucleotide
cctgatgattttgcaacttattactgcswmcagbhcaatagttacmtcacttttggcggagggaccaag

SEQ ID NO: 347 - DNA, 69 bp, Artificial Sequence
  Description of Artificial Sequence: Synthetic oligonucleotide
cctgatgattttgcaacttattactgcswmcagtacvrmagttacmtcacttttggcggagggaccaag

SEQ ID NO: 348 - DNA, 69 bp, Artificial Sequence
  Description of Artificial Sequence: Synthetic oligonucleotide
cctgatgattttgcaacttattactgcswmcagtacaatmbctacmtcacttttggcggagggaccaag

SEQ ID NO: 349 - DNA, 69 bp, Artificial Sequence
  Description of Artificial Sequence: Synthetic oligonucleotide
cctgatgattttgcaacttattactgcswmcagtacaatagtywcmtcacttttggcggagggaccaag

SEQ ID NO: 350 - DNA, 69 bp, Artificial Sequence
  Description of Artificial Sequence: Synthetic oligonucleotide
cctgatgattttgcaacttattactgccagswmbhcaatagttacmtcacttttggcggagggaccaag

SEQ ID NO: 351 - DNA, 69 bp, Artificial Sequence
  Description of Artificial Sequence: Synthetic oligonucleotide
cctgatgattttgcaacttattactgccagswmtacvrmagttacmtcacttttggcggagggaccaag

SEQ ID NO: 352 - DNA, 69 bp, Artificial Sequence
  Description of Artificial Sequence: Synthetic oligonucleotide
cctgatgattttgcaacttattactgccagswmtacaatmbctacmtcacttttggcggagggaccaag

SEQ ID NO: 353 - DNA, 69 bp, Artificial Sequence
  Description of Artificial Sequence: Synthetic oligonucleotide
cctgatgattttgcaacttattactgccagswmtacaatagtywcmtcacttttggcggagggaccaag

SEQ ID NO: 354 - DNA, 69 bp, Artificial Sequence
  Description of Artificial Sequence: Synthetic oligonucleotide
cctgatgattttgcaacttattactgcswmswmtacaatagttacwggacttttggcggagggaccaag

SEQ ID NO: 355 - DNA, 69 bp, Artificial Sequence
  Description of Artificial Sequence: Synthetic oligonucleotide
cctgatgattttgcaacttattactgccagcagbhcvrmagttacwggacttttggcggagggaccaag

SEQ ID NO: 356 - DNA, 69 bp, Artificial Sequence
  Description of Artificial Sequence: Synthetic oligonucleotide
cctgatgattttgcaacttattactgccagcagbhcaatmbctacwggacttttggcggagggaccaag

SEQ ID NO: 357 - DNA, 69 bp, Artificial Sequence
  Description of Artificial Sequence: Synthetic oligonucleotide
cctgatgattttgcaacttattactgccagcagbhcaatagtywcwggacttttggcggagggaccaag

SEQ ID NO: 358 - DNA, 69 bp, Artificial Sequence
  Description of Artificial Sequence: Synthetic oligonucleotide
cctgatgattttgcaacttattactgccagcagtacvrmmbctacwggacttttggcggagggaccaag

SEQ ID NO: 359 - DNA, 69 bp, Artificial Sequence
  Description of Artificial Sequence: Synthetic oligonucleotide
cctgatgattttgcaacttattactgccagcagtacvrmagtywcwggacttttggcggagggaccaag

SEQ ID NO: 360 - DNA, 69 bp, Artificial Sequence
  Description of Artificial Sequence: Synthetic oligonucleotide
cctgatgattttgcaacttattactgccagcagtacaatmbcywcwggacttttggcggagggaccaag

SEQ ID NO: 361 - DNA, 69 bp, Artificial Sequence
  Description of Artificial Sequence: Synthetic oligonucleotide
cctgatgattttgcaacttattactgcswmcagbhcaatagttacwggacttttggcggagggaccaag

SEQ ID NO: 362 - DNA, 69 bp, Artificial Sequence
  Description of Artificial Sequence: Synthetic oligonucleotide
cctgatgattttgcaacttattactgcswmcagtacvrmagttacwggacttttggcggagggaccaag

SEQ ID NO: 363 - DNA, 69 bp, Artificial Sequence
  Description of Artificial Sequence: Synthetic oligonucleotide
cctgatgattttgcaacttattactgcswmcagtacaatmbctacwggacttttggcggagggaccaag

SEQ ID NO: 364 - DNA, 69 bp, Artificial Sequence
  Description of Artificial Sequence: Synthetic oligonucleotide
cctgatgattttgcaacttattactgcswmcagtacaatagtywcwggacttttggcggagggaccaag

SEQ ID NO: 365 - DNA, 69 bp, Artificial Sequence
  Description of Artificial Sequence: Synthetic oligonucleotide
cctgatgattttgcaacttattactgccagswmbhcaatagttacwggacttttggcggagggaccaag

SEQ ID NO: 366 - DNA, 69 bp, Artificial Sequence
  Description of Artificial Sequence: Synthetic oligonucleotide
cctgatgattttgcaacttattactgccagswmtacvrmagttacwggacttttggcggagggaccaag

SEQ ID NO: 367 - DNA, 69 bp, Artificial Sequence
  Description of Artificial Sequence: Synthetic oligonucleotide
cctgatgattttgcaacttattactgccagswmtacaatmbctacwggacttttggcggagggaccaag

SEQ ID NO: 368 - DNA, 69 bp, Artificial Sequence
  Description of Artificial Sequence: Synthetic oligonucleotide
cctgatgattttgcaacttattactgccagswmtacaatagtywcwggacttttggcggagggaccaag

SEQ ID NO: 369 - DNA, 69 bp, Artificial Sequence
  Description of Artificial Sequence: Synthetic oligonucleotide
cctgatgattttgcaacttattactgcswmswmtacaatagttaccctacttttggcggagggaccaag

SEQ ID NO: 370 - DNA, 69 bp, Artificial Sequence
  Description of Artificial Sequence: Synthetic oligonucleotide
cctgatgattttgcaacttattactgccagcagbhcvrmagttaccctacttttggcggagggaccaag

SEQ ID NO: 371 - DNA, 69 bp, Artificial Sequence
  Description of Artificial Sequence: Synthetic oligonucleotide
cctgatgattttgcaacttattactgccagcagbhcaatmbctaccctacttttggcggagggaccaag

SEQ ID NO: 372 - DNA, 69 bp, Artificial Sequence
  Description of Artificial Sequence: Synthetic oligonucleotide
cctgatgattttgcaacttattactgccagcagbhcaatagtywccctacttttggcggagggaccaag

SEQ ID NO: 373 - DNA, 69 bp, Artificial Sequence
  Description of Artificial Sequence: Synthetic oligonucleotide
cctgatgattttgcaacttattactgccagcagtacvrmmbctaccctacttttggcggagggaccaag

SEQ ID NO: 374 - DNA, 69 bp, Artificial Sequence
  Description of Artificial Sequence: Synthetic oligonucleotide
cctgatgattttgcaacttattactgccagcagtacvrmagtywccctacttttggcggagggaccaag

SEQ ID NO: 375 - DNA, 69 bp, Artificial Sequence
  Description of Artificial Sequence: Synthetic oligonucleotide
cctgatgattttgcaacttattactgccagcagtacaatmbcywccctacttttggcggagggaccaag

SEQ ID NO: 376 - DNA, 69 bp, Artificial Sequence
  Description of Artificial Sequence: Synthetic oligonucleotide
cctgatgattttgcaacttattactgcswmcagbhcaatagttaccctacttttggcggagggaccaag

SEQ ID NO: 377 - DNA, 69 bp, Artificial Sequence
  Description of Artificial Sequence: Synthetic oligonucleotide
cctgatgattttgcaacttattactgcswmcagtacvrmagttaccctacttttggcggagggaccaag

SEQ ID NO: 378 - DNA, 69 bp, Artificial Sequence
  Description of Artificial Sequence: Synthetic oligonucleotide
cctgatgattttgcaacttattactgcswmcagtacaatmbctaccctacttttggcggagggaccaag

SEQ ID NO: 379 - DNA, 69 bp, Artificial Sequence
  Description of Artificial Sequence: Synthetic oligonucleotide
cctgatgattttgcaacttattactgcswmcagtacaatagtywccctacttttggcggagggaccaag

SEQ ID NO: 380 - DNA, 69 bp, Artificial Sequence
  Description of Artificial Sequence: Synthetic oligonucleotide
cctgatgattttgcaacttattactgccagswmbhcaatagttaccctacttttggcggagggaccaag

SEQ ID NO: 381 - DNA, 69 bp, Artificial Sequence
  Description of Artificial Sequence: Synthetic oligonucleotide
cctgatgattttgcaacttattactgccagswmtacvrmagttaccctacttttggcggagggaccaag

SEQ ID NO: 382 - DNA, 69 bp, Artificial Sequence
  Description of Artificial Sequence: Synthetic oligonucleotide
cctgatgattttgcaacttattactgccagswmtacaatmbctaccctacttttggcggagggaccaag

SEQ ID NO: 383 - DNA, 69 bp, Artificial Sequence
  Description of Artificial Sequence: Synthetic oligonucleotide
cctgatgattttgcaacttattactgccagswmtacaatagtywccctacttttggcggagggaccaag

SEQ ID NO: 384 - DNA, 69 bp, Artificial Sequence
  Description of Artificial Sequence: Synthetic oligonucleotide
cctgaagattttgcaacttattactgtswmswmgcaaatagtttctwcacttttggcggagggaccaag

SEQ ID NO: 385 - DNA, 69 bp, Artificial Sequence
  Description of Artificial Sequence: Synthetic oligonucleotide
  modified_base (35)..(35): a, c, t or g
  modified_base (37)..(37): a, c, t or g
cctgaagattttgcaacttattactgtcagcagrnanhcagtttctwcacttttggcggagggaccaag

SEQ ID NO: 386 - DNA, 69 bp, Artificial Sequence
  Description of Artificial Sequence: Synthetic oligonucleotide
  modified_base (35)..(35): a, c, t or g
  modified_base (40)..(40): a, c, t or g
cctgaagattttgcaacttattactgtcagcagrnaaatnhcttctwcacttttggcggagggaccaag

SEQ ID NO: 387 - DNA, 69 bp, Artificial Sequence
  Description of Artificial Sequence: Synthetic oligonucleotide
  modified_base (35)..(35): a, c, t or g
cctgaagattttgcaacttattactgtcagcagrnaaatagtywctwcacttttggcggagggaccaag

SEQ ID NO: 388 - DNA, 69 bp, Artificial Sequence
  Description of Artificial Sequence: Synthetic oligonucleotide
  modified_base (37)..(37): a, c, t or g
  modified_base (40)..(40): a, c, t or g
cctgaagattttgcaacttattactgtcagcaggcanhcnhcttctwcacttttggcggagggaccaag

SEQ ID NO: 389 - DNA, 69 bp, Artificial Sequence
  Description of Artificial Sequence: Synthetic oligonucleotide
  modified_base (37)..(37): a, c, t or g
cctgaagattttgcaacttattactgtcagcaggcanhcagtywctwcacttttggcggagggaccaag

SEQ ID NO: 390 - DNA, 69 bp, Artificial Sequence
  Description of Artificial Sequence: Synthetic oligonucleotide
  modified_base (40)..(40): a, c, t or g
cctgaagattttgcaacttattactgtcagcaggcaaatnhcywctwcacttttggcggagggaccaag

SEQ ID NO: 391 - DNA, 69 bp, Artificial Sequence
  Description of Artificial Sequence: Synthetic oligonucleotide
  modified_base (35)..(35): a, c, t or g
cctgaagattttgcaacttattactgtswmcagrnaaatagtttctwcacttttggcggagggaccaag

SEQ ID NO: 392 - DNA, 69 bp, Artificial Sequence
  Description of Artificial Sequence: Synthetic oligonucleotide
  modified_base (37)..(37): a, c, t or g
cctgaagattttgcaacttattactgtswmcaggcanhcagtttctwcacttttggcggagggaccaag

SEQ ID NO: 393 - DNA, 69 bp, Artificial Sequence
  Description of Artificial Sequence: Synthetic oligonucleotide
  modified_base (40)..(40): a, c, t or g
cctgaagattttgcaacttattactgtswmcaggcaaatnhcttctwcacttttggcggagggaccaag

SEQ ID NO: 394 - DNA, 69 bp, Artificial Sequence
  Description of Artificial Sequence: Synthetic oligonucleotide
cctgaagattttgcaacttattactgtswmcaggcaaatagtywctwcacttttggcggagggaccaag

SEQ ID NO: 395 - DNA, 69 bp, Artificial Sequence
  Description of Artificial Sequence: Synthetic oligonucleotide
  modified_base (35)..(35): a, c, t or g
cctgaagattttgcaacttattactgtcagswmrnaaatagtttctwcacttttggcggagggaccaag

SEQ ID NO: 396 - DNA, 69 bp, Artificial Sequence
  Description of Artificial Sequence: Synthetic oligonucleotide
  modified_base (37)..(37): a, c, t or g
cctgaagattttgcaacttattactgtcagswmgcanhcagtttctwcacttttggcggagggaccaag

SEQ ID NO: 397 - DNA, 69 bp, Artificial Sequence
  Description of Artificial Sequence: Synthetic oligonucleotide
  modified_base (40)..(40): a, c, t or g
cctgaagattttgcaacttattactgtcagswmgcaaatnhcttctwcacttttggcggagggaccaag

SEQ ID NO: 398 - DNA, 69 bp, Artificial Sequence
  Description of Artificial Sequence: Synthetic oligonucleotide
cctgaagattttgcaacttattactgtcagswmgcaaatagtywctwcacttttggcggagggaccaag

SEQ ID NO: 399 - DNA, 69 bp, Artificial Sequence
  Description of Artificial Sequence: Synthetic oligonucleotide
cctgaagattttgcaacttattactgtswmswmgcaaatagtttcmtcacttttggcggagggaccaag

SEQ ID NO: 400 - DNA, 69 bp, Artificial Sequence
  Description of Artificial Sequence: Synthetic oligonucleotide
  modified_base (35)..(35): a, c, t or g
  modified_base (37)..(37): a, c, t or g
cctgaagattttgcaacttattactgtcagcagrnanhcagtttcmtcacttttggcggagggaccaag

SEQ ID NO: 401 - DNA, 69 bp, Artificial Sequence
  Description of Artificial Sequence: Synthetic oligonucleotide
  modified_base (35)..(35): a, c, t or g
  modified_base (40)..(40): a, c, t or g
cctgaagattttgcaacttattactgtcagcagrnaaatnhcttcmtcacttttggcggagggaccaag

SEQ ID NO: 402 - DNA, 69 bp, Artificial Sequence
  Description of Artificial Sequence: Synthetic oligonucleotide
  modified_base (35)..(35): a, c, t or g
cctgaagattttgcaacttattactgtcagcagrnaaatagtywcmtcacttttggcggagggaccaag

SEQ ID NO: 403 - DNA, 69 bp, Artificial Sequence
  Description of Artificial Sequence: Synthetic oligonucleotide
  modified_base (37)..(37): a, c, t or g
  modified_base (40)..(40): a, c, t or g
cctgaagattttgcaacttattactgtcagcaggcanhcnhcttcmtcacttttggcggagggaccaag

SEQ ID NO: 404 - DNA, 69 bp, Artificial Sequence
  Description of Artificial Sequence: Synthetic oligonucleotide
  modified_base (37)..(37): a, c, t or g
cctgaagattttgcaacttattactgtcagcaggcanhcagtywcmtcacttttggcggagggaccaag

SEQ ID NO: 405 - DNA, 69 bp, Artificial Sequence
  Description of Artificial Sequence: Synthetic oligonucleotide
  modified_base (40)..(40): a, c, t or g
cctgaagattttgcaacttattactgtcagcaggcaaatnhcywcmtcacttttggcggagggaccaag

SEQ ID NO: 406 - DNA, 69 bp, Artificial Sequence
  Description of Artificial Sequence: Synthetic oligonucleotide
  modified_base (35)..(35): a, c, t or g
cctgaagattttgcaacttattactgtswmcagrnaaatagtttcmtcacttttggcggagggaccaag

SEQ ID NO: 407 - DNA, 69 bp, Artificial Sequence
  Description of Artificial Sequence: Synthetic oligonucleotide
  modified_base (37)..(37): a, c, t or g
cctgaagattttgcaacttattactgtswmcaggcanhcagtttcmtcacttttggcggagggaccaag

SEQ ID NO: 408 - DNA, 69 bp, Artificial Sequence
  Description of Artificial Sequence: Synthetic oligonucleotide
  modified_base (40)..(40): a, c, t or g
cctgaagattttgcaacttattactgtswmcaggcaaatnhcttcmtcacttttggcggagggaccaag

SEQ ID NO: 409 - DNA, 69 bp, Artificial Sequence
  Description of Artificial Sequence: Synthetic oligonucleotide
cctgaagattttgcaacttattactgtswmcaggcaaatagtywcmtcacttttggcggagggaccaag

SEQ ID NO: 410 - DNA, 69 bp, Artificial Sequence
  Description of Artificial Sequence: Synthetic oligonucleotide
  modified_base (35)..(35): a, c, t or g
cctgaagattttgcaacttattactgtcagswmrnaaatagtttcmtcacttttggcggagggaccaag

SEQ ID NO: 411 - DNA, 69 bp, Artificial Sequence
  Description of Artificial Sequence: Synthetic oligonucleotide
  modified_base (37)..(37): a, c, t or g
cctgaagattttgcaacttattactgtcagswmgcanhcagtttcmtcacttttggcggagggaccaag

SEQ ID NO: 412 - DNA, 69 bp, Artificial Sequence
  Description of Artificial Sequence: Synthetic oligonucleotide
  modified_base (40)..(40): a, c, t or g
cctgaagattttgcaacttattactgtcagswmgcaaatnhcttcmtcacttttggcggagggaccaag

SEQ ID NO: 413 - DNA, 69 bp, Artificial Sequence
  Description of Artificial Sequence: Synthetic oligonucleotide
cctgaagattttgcaacttattactgtcagswmgcaaatagtywcmtcacttttggcggagggaccaag

SEQ ID NO: 414 - DNA, 69 bp, Artificial Sequence
  Description of Artificial Sequence: Synthetic oligonucleotide
cctgaagattttgcaacttattactgtswmswmgcaaatagtttcwggacttttggcggagggaccaag

SEQ ID NO: 415 - DNA, 69 bp, Artificial Sequence
  Description of Artificial Sequence: Synthetic oligonucleotide
  modified_base (35)..(35): a, c, t or g
  modified_base (37)..(37): a, c, t or g
cctgaagattttgcaacttattactgtcagcagrnanhcagtttcwggacttttggcggagggaccaag

SEQ ID NO: 416 - DNA, 69 bp, Artificial Sequence
  Description of Artificial Sequence: Synthetic oligonucleotide
  modified_base (35)..(35): a, c, t or g
  modified_base (40)..(40): a, c, t or g
cctgaagattttgcaacttattactgtcagcagrnaaatnhcttcwggacttttggcggagggaccaag

SEQ ID NO: 417 - DNA, 69 bp, Artificial Sequence
  Description of Artificial Sequence: Synthetic oligonucleotide
  modified_base (35)..(35): a, c, t or g
cctgaagattttgcaacttattactgtcagcagrnaaatagtywcwggacttttggcggagggaccaag

SEQ ID NO: 418 - DNA, 69 bp, Artificial Sequence
  Description of Artificial Sequence: Synthetic oligonucleotide
  modified_base (37)..(37): a, c, t or g
  modified_base (40)..(40): a, c, t or g
cctgaagattttgcaacttattactgtcagcaggcanhcnhcttcwggacttttggcggagggaccaag

SEQ ID NO: 419 - DNA, 69 bp, Artificial Sequence
  Description of Artificial Sequence: Synthetic oligonucleotide
  modified_base (37)..(37): a, c, t or g
cctgaagattttgcaacttattactgtcagcaggcanhcagtywcwggacttttggcggagggaccaag

SEQ ID NO: 420 - DNA, 69 bp, Artificial Sequence
  Description of Artificial Sequence: Synthetic oligonucleotide
  modified_base (40)..(40): a, c, t or g
cctgaagattttgcaacttattactgtcagcaggcaaatnhcywcwggacttttggcggagggaccaag

SEQ ID NO: 421 - DNA, 69 bp, Artificial Sequence
  Description of Artificial Sequence: Synthetic oligonucleotide
  modified_base (35)..(35): a, c, t or g
cctgaagattttgcaacttattactgtswmcagrnaaatagtttcwggacttttggcggagggaccaag

SEQ ID NO: 422 - DNA, 69 bp, Artificial Sequence
  Description of Artificial Sequence: Synthetic oligonucleotide
  modified_base (37)..(37): a, c, t or g
cctgaagattttgcaacttattactgtswmcaggcanhcagtttcwggacttttggcggagggaccaag

SEQ ID NO: 423 - DNA, 69 bp, Artificial Sequence
  Description of Artificial Sequence: Synthetic oligonucleotide
  modified_base (40)..(40): a, c, t or g
cctgaagattttgcaacttattactgtswmcaggcaaatnhcttcwggacttttggcggagggaccaag

SEQ ID NO: 424 - DNA, 69 bp, Artificial Sequence
  Description of Artificial Sequence: Synthetic oligonucleotide
cctgaagattttgcaacttattactgtswmcaggcaaatagtywcwggacttttggcggagggaccaag

SEQ ID NO: 425 - DNA, 69 bp, Artificial Sequence
  Description of Artificial Sequence: Synthetic oligonucleotide
  modified_base (35)..(35): a, c, t or g
cctgaagattttgcaacttattactgtcagswmrnaaatagtttcwggacttttggcggagggaccaag

SEQ ID NO: 426 - DNA, 69 bp, Artificial Sequence
  Description of Artificial Sequence: Synthetic oligonucleotide
  modified_base (37)..(37): a, c, t or g
cctgaagattttgcaacttattactgtcagswmgcanhcagtttcwggacttttggcggagggaccaag

SEQ ID NO: 427 - DNA, 69 bp, Artificial Sequence
  Description of Artificial Sequence: Synthetic oligonucleotide
  modified_base (40)..(40): a, c, t or g
cctgaagattttgcaacttattactgtcagswmgcaaatnhcttcwggacttttggcggagggaccaag

SEQ ID NO: 428 - DNA, 69 bp, Artificial Sequence
  Description of Artificial Sequence: Synthetic oligonucleotide
cctgaagattttgcaacttattactgtcagswmgcaaatagtywcwggacttttggcggagggaccaag

SEQ ID NO: 429 - DNA, 69 bp, Artificial Sequence
  Description of Artificial Sequence: Synthetic oligonucleotide
cctgaagattttgcaacttattactgtswmswmgcaaatagtttccctacttttggcggagggaccaag

SEQ ID NO: 430 - DNA, 69 bp, Artificial Sequence
  Description of Artificial Sequence: Synthetic oligonucleotide
  modified_base (35)..(35): a, c, t or g
  modified_base (37)..(37): a, c, t or g
cctgaagattttgcaacttattactgtcagcagrnanhcagtttccctacttttggcggagggaccaag

SEQ ID NO: 431 - DNA, 69 bp, Artificial Sequence
  Description of Artificial Sequence: Synthetic oligonucleotide
  modified_base (35)..(35): a, c, t or g
  modified_base (40)..(40): a, c, t or g
cctgaagattttgcaacttattactgtcagcagrnaaatnhcttccctacttttggcggagggaccaag

SEQ ID NO: 432 - DNA, 69 bp, Artificial Sequence
  Description of Artificial Sequence: Synthetic oligonucleotide
  modified_base (35)..(35): a, c, t or g
cctgaagattttgcaacttattactgtcagcagrnaaatagtywccctacttttggcggagggaccaag

SEQ ID NO: 433 - DNA, 69 bp, Artificial Sequence
  Description of Artificial Sequence: Synthetic oligonucleotide
  modified_base (37)..(37): a, c, t or g
  modified_base (40)..(40): a, c, t or g
cctgaagattttgcaacttattactgtcagcaggcanhcnhcttccctacttttggcggagggaccaag

SEQ ID NO: 434 - DNA, 69 bp, Artificial Sequence
  Description of Artificial Sequence: Synthetic oligonucleotide
  modified_base (37)..(37): a, c, t or g
cctgaagattttgcaacttattactgtcagcaggcanhcagtywccctacttttggcggagggaccaag

SEQ ID NO: 435 - DNA, 69 bp, Artificial Sequence
  Description of Artificial Sequence: Synthetic oligonucleotide
  modified_base (40)..(40): a, c, t or g
cctgaagattttgcaacttattactgtcagcaggcaaatnhcywccctacttttggcggagggaccaag

SEQ ID NO: 436 - DNA, 69 bp, Artificial Sequence
  Description of Artificial Sequence: Synthetic oligonucleotide
  modified_base (35)..(35): a, c, t or g
cctgaagattttgcaacttattactgtswmcagrnaaatagtttccctacttttggcggagggaccaag

SEQ ID NO: 437 - DNA, 69 bp, Artificial Sequence
  Description of Artificial Sequence: Synthetic oligonucleotide
  modified_base (37)..(37): a, c, t or g
cctgaagattttgcaacttattactgtswmcaggcanhcagtttccctacttttggcggagggaccaag

SEQ ID NO: 438 - DNA, 69 bp, Artificial Sequence
  Description of Artificial Sequence: Synthetic oligonucleotide
  modified_base (40)..(40): a, c, t or g
cctgaagattttgcaacttattactgtswmcaggcaaatnhcttccctacttttggcggagggaccaag

SEQ ID NO: 439 - DNA, 69 bp, Artificial Sequence
  Description of Artificial Sequence: Synthetic oligonucleotide
cctgaagattttgcaacttattactgtswmcaggcaaatagtywccctacttttggcggagggaccaag

SEQ ID NO: 440 - DNA, 69 bp, Artificial Sequence
  Description of Artificial Sequence: Synthetic oligonucleotide
  modified_base (35)..(35): a, c, t or g
cctgaagattttgcaacttattactgtcagswmrnaaatagtttccctacttttggcggagggaccaag

SEQ ID NO: 441 - DNA, 69 bp, Artificial Sequence
  Description of Artificial Sequence: Synthetic oligonucleotide
  modified_base (37)..(37): a, c, t or g
cctgaagattttgcaacttattactgtcagswmgcanhcagtttccctacttttggcggagggaccaag

SEQ ID NO: 442 - DNA, 69 bp, Artificial Sequence
  Description of Artificial Sequence: Synthetic oligonucleotide
  modified_base (40)..(40): a, c, t or g
cctgaagattttgcaacttattactgtcagswmgcaaatnhcttccctacttttggcggagggaccaag

SEQ ID NO: 443 - DNA, 69 bp, Artificial Sequence
  Description of Artificial Sequence: Synthetic oligonucleotide
cctgaagattttgcaacttattactgtcagswmgcaaatagtywccctacttttggcggagggaccaag

SEQ ID NO: 444 - DNA, 69 bp, Artificial Sequence
  Description of Artificial Sequence: Synthetic oligonucleotide
cctgaagatattgcaacatattactgtswmswmtacgataatctctwcacttttggcggagggaccaag

SEQ ID NO: 445 - DNA, 69 bp, Artificial Sequence
  Description of Artificial Sequence: Synthetic oligonucleotide
  modified_base (37)..(37): a, c, t or g
cctgaagatattgcaacatattactgtcagcagbhcnhcaatctctwcacttttggcggagggaccaag

SEQ ID NO: 446 - DNA, 69 bp, Artificial Sequence
  Description of Artificial Sequence: Synthetic oligonucleotide
  modified_base (40)..(40): a, c, t or g
cctgaagatattgcaacatattactgtcagcagbhcgatnhcctctwcacttttggcggagggaccaag

SEQ ID NO: 447 - DNA, 69 bp, Artificial Sequence
  Description of Artificial Sequence: Synthetic oligonucleotide
cctgaagatattgcaacatattactgtcagcagbhcgataatywctwcacttttggcggagggaccaag

SEQ ID NO: 448 - DNA, 69 bp, Artificial Sequence
  Description of Artificial Sequence: Synthetic oligonucleotide
  modified_base (37)..(37): a, c, t or g
  modified_base (40)..(40): a, c, t or g
cctgaagatattgcaacatattactgtcagcagtacnhcnhcctctwcacttttggcggagggaccaag

SEQ ID NO: 449 - DNA, 69 bp, Artificial Sequence
  Description of Artificial Sequence: Synthetic oligonucleotide
  modified_base (37)..(37): a, c, t or g
cctgaagatattgcaacatattactgtcagcagtacnhcaatywctwcacttttggcggagggaccaag

SEQ ID NO: 450 - DNA, 69 bp, Artificial Sequence
  Description of Artificial Sequence: Synthetic oligonucleotide
  modified_base (40)..(40): a, c, t or g
cctgaagatattgcaacatattactgtcagcagtacgatnhcywctwcacttttggcggagggaccaag

SEQ ID NO: 451 - DNA, 69 bp, Artificial Sequence
  Description of Artificial Sequence: Synthetic oligonucleotide
cctgaagatattgcaacatattactgtswmcagbhcgataatctctwcacttttggcggagggaccaag

SEQ ID NO: 452 - DNA, 69 bp, Artificial Sequence
  Description of Artificial Sequence: Synthetic oligonucleotide
  modified_base (37)..(37): a, c, t or g
cctgaagatattgcaacatattactgtswmcagtacnhcaatctctwcacttttggcggagggaccaag

SEQ ID NO: 453 - DNA, 69 bp, Artificial Sequence
  Description of Artificial Sequence: Synthetic oligonucleotide
  modified_base (40)..(40): a, c, t or g
cctgaagatattgcaacatattactgtswmcagtacgatnhcctctwcacttttggcggagggaccaag

SEQ ID NO: 454 - DNA, 69 bp, Artificial Sequence
  Description of Artificial Sequence: Synthetic oligonucleotide
cctgaagatattgcaacatattactgtswmcagtacgataatywctwcacttttggcggagggaccaag

SEQ ID NO: 455 - DNA, 69 bp, Artificial Sequence
  Description of Artificial Sequence: Synthetic oligonucleotide
cctgaagatattgcaacatattactgtcagswmbhcgataatctctwcacttttggcggagggaccaag

SEQ ID NO: 456 - DNA, 69 bp, Artificial Sequence
  Description of Artificial Sequence: Synthetic oligonucleotide
  modified_base (37)..(37): a, c, t or g
cctgaagatattgcaacatattactgtcagswmtacnhcaatctctwcacttttggcggagggaccaag

SEQ ID NO: 457 - DNA, 69 bp, Artificial Sequence
  Description of Artificial Sequence: Synthetic oligonucleotide
  modified_base (40)..(40): a, c, t or g
cctgaagatattgcaacatattactgtcagswmtacgatnhcctctwcacttttggcggagggaccaag

SEQ ID NO: 458 - DNA, 69 bp, Artificial Sequence
  Description of Artificial Sequence: Synthetic oligonucleotide
cctgaagatattgcaacatattactgtcagswmtacgataatywctwcacttttggcggagggaccaag

SEQ ID NO: 459 - DNA, 69 bp, Artificial Sequence
  Description of Artificial Sequence: Synthetic oligonucleotide
cctgaagatattgcaacatattactgtswmswmtacgataatctcmtcacttttggcggagggaccaag

SEQ ID NO: 460 - DNA, 69 bp, Artificial Sequence
  Description of Artificial Sequence: Synthetic oligonucleotide
  modified_base (37)..(37): a, c, t or g
cctgaagatattgcaacatattactgtcagcagbhcnhcaatctcmtcacttttggcggagggaccaag

SEQ ID NO: 461 - DNA, 69 bp, Artificial Sequence
  Description of Artificial Sequence: Synthetic oligonucleotide
  modified_base (40)..(40): a, c, t or g
cctgaagatattgcaacatattactgtcagcagbhcgatnhcctcmtcacttttggcggagggaccaag

SEQ ID NO: 462 - DNA, 69 bp, Artificial Sequence
  Description of Artificial Sequence: Synthetic oligonucleotide
cctgaagatattgcaacatattactgtcagcagbhcgataatywcmtcacttttggcggagggaccaag

SEQ ID NO: 463 - DNA, 69 bp, Artificial Sequence
  Description of Artificial Sequence: Synthetic oligonucleotide
  modified_base (37)..(37): a, c, t or g
  modified_base (40)..(40): a, c, t or g
cctgaagatattgcaacatattactgtcagcagtacnhcnhcctcmtcacttttggcggagggaccaag

SEQ ID NO: 464 - DNA, 69 bp, Artificial Sequence
  Description of Artificial Sequence: Synthetic oligonucleotide
  modified_base (37)..(37): a, c, t or g
cctgaagatattgcaacatattactgtcagcagtacnhcaatywcmtcacttttggcggagggaccaag

SEQ ID NO: 465 - DNA, 69 bp, Artificial Sequence
  Description of Artificial Sequence: Synthetic oligonucleotide
  modified_base (40)..(40): a, c, t or g
cctgaagatattgcaacatattactgtcagcagtacgatnhcywcmtcacttttggcggagggaccaag

SEQ ID NO: 466 - DNA, 69 bp, Artificial Sequence
  Description of Artificial Sequence: Synthetic oligonucleotide
cctgaagatattgcaacatattactgtswmcagbhcgataatctcmtcacttttggcggagggaccaag

SEQ ID NO: 467 - DNA, 69 bp, Artificial Sequence
  Description of Artificial Sequence: Synthetic oligonucleotide
  modified_base (37)..(37): a, c, t or g
cctgaagatattgcaacatattactgtswmcagtacnhcaatctcmtcacttttggcggagggaccaag

SEQ ID NO: 468 - DNA, 69 bp, Artificial Sequence
  Description of Artificial Sequence: Synthetic oligonucleotide
  modified_base (40)..(40): a, c, t or g
cctgaagatattgcaacatattactgtswmcagtacgatnhcctcmtcacttttggcggagggaccaag

SEQ ID NO: 469 - DNA, 69 bp, Artificial Sequence
  Description of Artificial Sequence: Synthetic oligonucleotide
cctgaagatattgcaacatattactgtswmcagtacgataatywcmtcacttttggcggagggaccaag

SEQ ID NO: 470 - DNA, 69 bp, Artificial Sequence
  Description of Artificial Sequence: Synthetic oligonucleotide
cctgaagatattgcaacatattactgtcagswmbhcgataatctcmtcacttttggcggagggaccaag

SEQ ID NO: 471 - DNA, 69 bp, Artificial Sequence
  Description of Artificial Sequence: Synthetic oligonucleotide
  modified_base (37)..(37): a, c, t or g
cctgaagatattgcaacatattactgtcagswmtacnhcaatctcmtcacttttggcggagggaccaag

SEQ ID NO: 472 - DNA, 69 bp, Artificial Sequence
  Description of Artificial Sequence: Synthetic oligonucleotide
  modified_base (40)..(40): a, c, t or g
cctgaagatattgcaacatattactgtcagswmtacgatnhcctcmtcacttttggcggagggaccaag

SEQ ID NO: 473 - DNA, 69 bp, Artificial Sequence
  Description of Artificial Sequence: Synthetic oligonucleotide
cctgaagatattgcaacatattactgtcagswmtacgataatywcmtcacttttggcggagggaccaag

SEQ ID NO: 474 - DNA, 69 bp, Artificial Sequence
  Description of Artificial Sequence: Synthetic oligonucleotide
cctgaagatattgcaacatattactgtswmswmtacgataatctcwggacttttggcggagggaccaag

SEQ ID NO: 475 - DNA, 69 bp, Artificial Sequence
  Description of Artificial Sequence: Synthetic oligonucleotide
  modified_base (37)..(37): a, c, t or g
cctgaagatattgcaacatattactgtcagcagbhcnhcaatctcwggacttttggcggagggaccaag

SEQ ID NO: 476 - DNA, 69 bp, Artificial Sequence
  Description of Artificial Sequence: Synthetic oligonucleotide
  modified_base (40)..(40): a, c, t or g
cctgaagatattgcaacatattactgtcagcagbhcgatnhcctcwggacttttggcggagggaccaag

SEQ ID NO: 477 - DNA, 69 bp, Artificial Sequence
  Description of Artificial Sequence: Synthetic oligonucleotide
cctgaagatattgcaacatattactgtcagcagbhcgataatywcwggacttttggcggagggaccaag

SEQ ID NO: 478 - DNA, 69 bp, Artificial Sequence
  Description of Artificial Sequence: Synthetic oligonucleotide
  modified_base (37)..(37): a, c, t or g
  modified_base (40)..(40): a, c, t or g
cctgaagatattgcaacatattactgtcagcagtacnhcnhcctcwggacttttggcggagggaccaag

SEQ ID NO: 479 - DNA, 69 bp, Artificial Sequence
  Description of Artificial Sequence: Synthetic oligonucleotide
  modified_base (37)..(37): a, c, t or g
cctgaagatattgcaacatattactgtcagcagtacnhcaatywcwggacttttggcggagggaccaag

SEQ ID NO: 480 - DNA, 69 bp, Artificial Sequence
  Description of Artificial Sequence: Synthetic oligonucleotide
  modified_base (40)..(40): a, c, t or g
cctgaagatattgcaacatattactgtcagcagtacgatnhcywcwggacttttggcggagggaccaag

SEQ ID NO: 481 - DNA, 69 bp, Artificial Sequence
  Description of Artificial Sequence: Synthetic oligonucleotide
cctgaagatattgcaacatattactgtswmcagbhcgataatctcwggacttttggcggagggaccaag

SEQ ID NO: 482 - DNA, 69 bp, Artificial Sequence
  Description of Artificial Sequence: Synthetic oligonucleotide
  modified_base (37)..(37): a, c, t or g
cctgaagatattgcaacatattactgtswmcagtacnhcaatctcwggacttttggcggagggaccaag

SEQ ID NO: 483 - DNA, 69 bp, Artificial Sequence
  Description of Artificial Sequence: Synthetic oligonucleotide
  modified_base (40)..(40): a, c, t or g
cctgaagatattgcaacatattactgtswmcagtacgatnhcctcwggacttttggcggagggaccaag

SEQ ID NO: 484 - DNA, 69 bp, Artificial Sequence
  Description of Artificial Sequence: Synthetic oligonucleotide
cctgaagatattgcaacatattactgtswmcagtacgataatywcwggacttttggcggagggaccaag

SEQ ID NO: 485 - DNA, 69 bp, Artificial Sequence
  Description of Artificial Sequence: Synthetic oligonucleotide
cctgaagatattgcaacatattactgtcagswmbhcgataatctcwggacttttggcggagggaccaag

SEQ ID NO: 486 - DNA, 69 bp, Artificial Sequence
  Description of Artificial Sequence: Synthetic oligonucleotide
  modified_base (37)..(37): a, c, t or g
cctgaagatattgcaacatattactgtcagswmtacnhcaatctcwggacttttggcggagggaccaag

SEQ ID NO: 487 - DNA, 69 bp, Artificial Sequence
  Description of Artificial Sequence: Synthetic oligonucleotide
  modified_base (40)..(40): a, c, t or g
cctgaagatattgcaacatattactgtcagswmtacgatnhcctcwggacttttggcggagggaccaag

SEQ ID NO: 488 - DNA, 69 bp, Artificial Sequence
  Description of Artificial Sequence: Synthetic oligonucleotide
cctgaagatattgcaacatattactgtcagswmtacgataatywcwggacttttggcggagggaccaag

SEQ ID NO: 489 - DNA, 69 bp, Artificial Sequence
  Description of Artificial Sequence: Synthetic oligonucleotide
cctgaagatattgcaacatattactgtswmswmtacgataatctccctacttttggcggagggaccaag

SEQ ID NO: 490 - DNA, 69 bp, Artificial Sequence
  Description of Artificial Sequence: Synthetic oligonucleotide
  modified_base (37)..(37): a, c, t or g
cctgaagatattgcaacatattactgtcagcagbhcnhcaatctccctacttttggcggagggaccaag

SEQ ID NO: 491 - DNA, 69 bp, Artificial Sequence
  Description of Artificial Sequence: Synthetic oligonucleotide
  modified_base (40)..(40): a, c, t or g
cctgaagatattgcaacatattactgtcagcagbhcgatnhcctccctacttttggcggagggaccaag

SEQ ID NO: 492 - DNA, 69 bp, Artificial Sequence
  Description of Artificial Sequence: Synthetic oligonucleotide
cctgaagatattgcaacatattactgtcagcagbhcgataatywccctacttttggcggagggaccaag

SEQ ID NO: 493 - DNA, 69 bp, Artificial Sequence
  Description of Artificial Sequence: Synthetic oligonucleotide
  modified_base (37)..(37): a, c, t or g
  modified_base (40)..(40): a, c, t or g
cctgaagatattgcaacatattactgtcagcagtacnhcnhcctccctacttttggcggagggaccaag

SEQ ID NO: 494 - DNA, 69 bp, Artificial Sequence
  Description of Artificial Sequence: Synthetic oligonucleotide
  modified_base (37)..(37): a, c, t or g
cctgaagatattgcaacatattactgtcagcagtacnhcaatywccctacttttggcggagggaccaag

SEQ ID NO: 495 - DNA, 69 bp, Artificial Sequence
  Description of Artificial Sequence: Synthetic oligonucleotide
  modified_base (40)..(40): a, c, t or g
cctgaagatattgcaacatattactgtcagcagtacgatnhcywccctacttttggcggagggaccaag

SEQ ID NO: 496 - DNA, 69 bp, Artificial Sequence
  Description of Artificial Sequence: Synthetic oligonucleotide
cctgaagatattgcaacatattactgtswmcagbhcgataatctccctacttttggcggagggaccaag

SEQ ID NO: 497 - DNA, 69 bp, Artificial Sequence
  Description of Artificial Sequence: Synthetic oligonucleotide
  modified_base (37)..(37): a, c, t or g
cctgaagatattgcaacatattactgtswmcagtacnhcaatctccctacttttggcggagggaccaag

SEQ ID NO: 498 - DNA, 69 bp, Artificial Sequence
  Description of Artificial Sequence: Synthetic oligonucleotide
  modified_base (40)..(40): a, c, t or g
cctgaagatattgcaacatattactgtswmcagtacgatnhcctccctacttttggcggagggaccaag

SEQ ID NO: 499 - DNA, 69 bp, Artificial Sequence
  Description of Artificial Sequence: Synthetic oligonucleotide
cctgaagatattgcaacatattactgtswmcagtacgataatywccctacttttggcggagggaccaag

SEQ ID NO: 500 - DNA, 69 bp, Artificial Sequence
  Description of Artificial Sequence: Synthetic oligonucleotide
cctgaagatattgcaacatattactgtcagswmbhcgataatctccctacttttggcggagggaccaag

SEQ ID NO: 501 - DNA, 69 bp, Artificial Sequence
  Description of Artificial Sequence: Synthetic oligonucleotide
  modified_base (37)..(37): a, c, t or g
cctgaagatattgcaacatattactgtcagswmtacnhcaatctccctacttttggcggagggaccaag

SEQ ID NO: 502 - DNA, 69 bp, Artificial Sequence
  Description of Artificial Sequence: Synthetic oligonucleotide
  modified_base (40)..(40): a, c, t or g
cctgaagatattgcaacatattactgtcagswmtacgatnhcctccctacttttggcggagggaccaag

SEQ ID NO: 503 - DNA, 69 bp, Artificial Sequence
  Description of Artificial Sequence: Synthetic oligonucleotide
cctgaagatattgcaacatattactgtcagswmtacgataatywccctacttttggcggagggaccaag

SEQ ID NO: 504 - DNA, 69 bp, Artificial Sequence
  Description of Artificial Sequence: Synthetic oligonucleotide
cctgaagattttgcaacttactactgtswmswmagctacagtacttwcacttttggcggagggaccaag

SEQ ID NO: 505 - DNA, 69 bp, Artificial Sequence
  Description of Artificial Sequence: Synthetic oligonucleotide
  modified_base (35)..(35): a, c, t or g
cctgaagattttgcaacttactactgtcagcaavnabhcagtacttwcacttttggcggagggaccaag

SEQ ID NO: 506 - DNA, 69 bp, Artificial Sequence
  Description of Artificial Sequence: Synthetic oligonucleotide
  modified_base (35)..(35): a, c, t or g
  modified_base (40)..(40): a, c, t or g
cctgaagattttgcaacttactactgtcagcaavnatacnhcacttwcacttttggcggagggaccaag

SEQ ID NO: 507 - DNA, 69 bp, Artificial Sequence
  Description of Artificial Sequence: Synthetic oligonucleotide
  modified_base (35)..(35): a, c, t or g
cctgaagattttgcaacttactactgtcagcaavnatacagtbhctwcacttttggcggagggaccaag

SEQ ID NO: 508 - DNA, 69 bp, Artificial Sequence
  Description of Artificial Sequence: Synthetic oligonucleotide
  modified_base (40)..(40): a, c, t or g
cctgaagattttgcaacttactactgtcagcaaagcbhcnhcacttwcacttttggcggagggaccaag

SEQ ID NO: 509 - DNA, 69 bp, Artificial Sequence
  Description of Artificial Sequence: Synthetic oligonucleotide
cctgaagattttgcaacttactactgtcagcaaagcbhcagtbhctwcacttttggcggagggaccaag

SEQ ID NO: 510 - DNA, 69 bp, Artificial Sequence
  Description of Artificial Sequence: Synthetic oligonucleotide
  modified_base (40)..(40): a, c, t or g
cctgaagattttgcaacttactactgtcagcaaagctacnhcbhctwcacttttggcggagggaccaag

SEQ ID NO: 511 - DNA, 69 bp, Artificial Sequence
  Description of Artificial Sequence: Synthetic oligonucleotide
  modified_base (35)..(35): a, c, t or g
cctgaagattttgcaacttactactgtswmcaavnatacagtacttwcacttttggcggagggaccaag

SEQ ID NO: 512 - DNA, 69 bp, Artificial Sequence
  Description of Artificial Sequence: Synthetic oligonucleotide
cctgaagattttgcaacttactactgtswmcaaagcbhcagtacttwcacttttggcggagggaccaag

SEQ ID NO: 513 - DNA, 69 bp, Artificial Sequence
  Description of Artificial Sequence: Synthetic oligonucleotide
  modified_base (40)..(40): a, c, t or g
cctgaagattttgcaacttactactgtswmcaaagctacnhcacttwcacttttggcggagggaccaag

SEQ ID NO: 514 - DNA, 69 bp, Artificial Sequence
  Description of Artificial Sequence: Synthetic oligonucleotide
cctgaagattttgcaacttactactgtswmcaaagctacagtbhctwcacttttggcggagggaccaag

SEQ ID NO: 515 - DNA, 69 bp, Artificial Sequence
  Description of Artificial Sequence: Synthetic oligonucleotide
  modified_base (35)..(35): a, c, t or g
cctgaagattttgcaacttactactgtcagswmvnatacagtacttwcacttttggcggagggaccaag

SEQ ID NO: 516 - DNA, 69 bp, Artificial Sequence
  Description of Artificial Sequence: Synthetic oligonucleotide
cctgaagattttgcaacttactactgtcagswmagcbhcagtacttwcacttttggcggagggaccaag

SEQ ID NO: 517 - DNA, 69 bp, Artificial Sequence
  Description of Artificial Sequence: Synthetic oligonucleotide
  modified_base (40)..(40): a, c, t or g
cctgaagattttgcaacttactactgtcagswmagctacnhcacttwcacttttggcggagggaccaag

SEQ ID NO: 518 - DNA, 69 bp, Artificial Sequence
  Description of Artificial Sequence: Synthetic oligonucleotide
cctgaagattttgcaacttactactgtcagswmagctacagtbhctwcacttttggcggagggaccaag

SEQ ID NO: 519 - DNA, 69 bp, Artificial Sequence
  Description of Artificial Sequence: Synthetic oligonucleotide
cctgaagattttgcaacttactactgtswmswmagctacagtactmtcacttttggcggagggaccaag

SEQ ID NO: 520 - DNA, 69 bp, Artificial Sequence
  Description of Artificial Sequence: Synthetic oligonucleotide
  modified_base (35)..(35): a, c, t or g
cctgaagattttgcaacttactactgtcagcaavnabhcagtactmtcacttttggcggagggaccaag

SEQ ID NO: 521 - DNA, 69 bp, Artificial Sequence
  Description of Artificial Sequence: Synthetic oligonucleotide
  modified_base (35)..(35): a, c, t or g
  modified_base (40)..(40): a, c, t or g
cctgaagattttgcaacttactactgtcagcaavnatacnhcactmtcacttttggcggagggaccaag

SEQ ID NO: 522 - DNA, 69 bp, Artificial Sequence
  Description of Artificial Sequence: Synthetic oligonucleotide
  modified_base (35)..(35): a, c, t or g
cctgaagattttgcaacttactactgtcagcaavnatacagtbhcmtcacttttggcggagggaccaag

SEQ ID NO: 523 - DNA, 69 bp, Artificial Sequence
  Description of Artificial Sequence: Synthetic oligonucleotide
  modified_base (40)..(40): a, c, t or g
cctgaagattttgcaacttactactgtcagcaaagcbhcnhcactmtcacttttggcggagggaccaag

SEQ ID NO: 524 - DNA, 69 bp, Artificial Sequence
  Description of Artificial Sequence: Synthetic oligonucleotide
cctgaagattttgcaacttactactgtcagcaaagcbhcagtbhcmtcacttttggcggagggaccaag

SEQ ID NO: 525 - DNA, 69 bp, Artificial Sequence
  Description of Artificial Sequence: Synthetic oligonucleotide
  modified_base (40)..(40): a, c, t or g
cctgaagattttgcaacttactactgtcagcaaagctacnhcbhcmtcacttttggcggagggaccaag

SEQ ID NO: 526 - DNA, 69 bp, Artificial Sequence
  Description of Artificial Sequence: Synthetic oligonucleotide
  modified_base (35)..(35): a, c, t or g
cctgaagattttgcaacttactactgtswmcaavnatacagtactmtcacttttggcggagggaccaag

SEQ ID NO: 527 - DNA, 69 bp, Artificial Sequence
  Description of Artificial Sequence: Synthetic oligonucleotide
cctgaagattttgcaacttactactgtswmcaaagcbhcagtactmtcacttttggcggagggaccaag

SEQ ID NO: 528 - DNA, 69 bp, Artificial Sequence
  Description of Artificial Sequence: Synthetic oligonucleotide
  modified_base (40)..(40): a, c, t or g
cctgaagattttgcaacttactactgtswmcaaagctacnhcactmtcacttttggcggagggaccaag

SEQ ID NO: 529 - DNA, 69 bp, Artificial Sequence
  Description of Artificial Sequence: Synthetic oligonucleotide
cctgaagattttgcaacttactactgtswmcaaagctacagtbhcmtcacttttggcggagggaccaag

SEQ ID NO: 530 - DNA, 69 bp, Artificial Sequence
  Description of Artificial Sequence: Synthetic oligonucleotide
  modified_base (35)..(35): a, c, t or g
cctgaagattttgcaacttactactgtcagswmvnatacagtactmtcacttttggcggagggaccaag

SEQ ID NO: 531 - DNA, 69 bp, Artificial Sequence
  Description of Artificial Sequence: Synthetic oligonucleotide
cctgaagattttgcaacttactactgtcagswmagcbhcagtactmtcacttttggcggagggaccaag

SEQ ID NO: 532 - DNA, 69 bp, Artificial Sequence
  Description of Artificial Sequence: Synthetic oligonucleotide
  modified_base (40)..(40): a, c, t or g
cctgaagattttgcaacttactactgtcagswmagctacnhcactmtcacttttggcggagggaccaag

SEQ ID NO: 533 - DNA, 69 bp, Artificial Sequence
  Description of Artificial Sequence: Synthetic oligonucleotide
cctgaagattttgcaacttactactgtcagswmagctacagtbhcmtcacttttggcggagggaccaag

SEQ ID NO: 534 - DNA, 69 bp, Artificial Sequence
  Description of Artificial Sequence: Synthetic oligonucleotide
cctgaagattttgcaacttactactgtswmswmagctacagtactwggacttttggcggagggaccaag

SEQ ID NO: 535 - DNA, 69 bp, Artificial Sequence
  Description of Artificial Sequence: Synthetic oligonucleotide
  modified_base (35)..(35): a, c, t or g
cctgaagattttgcaacttactactgtcagcaavnabhcagtactwggacttttggcggagggaccaag

SEQ ID NO: 536 - DNA, 69 bp, Artificial Sequence
  Description of Artificial Sequence: Synthetic oligonucleotide
  modified_base (35)..(35): a, c, t or g
  modified_base (40)..(40): a, c, t or g
cctgaagattttgcaacttactactgtcagcaavnatacnhcactwggacttttggcggagggaccaag

SEQ ID NO: 537 - DNA, 69 bp, Artificial Sequence
  Description of Artificial Sequence: Synthetic oligonucleotide
  modified_base (35)..(35): a, c, t or g
cctgaagattttgcaacttactactgtcagcaavnatacagtbhcwggacttttggcggagggaccaag

SEQ ID NO: 538 - DNA, 69 bp, Artificial Sequence
  Description of Artificial Sequence: Synthetic oligonucleotide
  modified_base (40)..(40): a, c, t or g
cctgaagattttgcaacttactactgtcagcaaagcbhcnhcactwggacttttggcggagggaccaag

SEQ ID NO: 539 - DNA, 69 bp, Artificial Sequence
  Description of Artificial Sequence: Synthetic oligonucleotide
cctgaagattttgcaacttactactgtcagcaaagcbhcagtbhcwggacttttggcggagggaccaag

SEQ ID NO: 540 - DNA, 69 bp, Artificial Sequence
  Description of Artificial Sequence: Synthetic oligonucleotide
  modified_base (40)..(40): a, c, t or g
cctgaagattttgcaacttactactgtcagcaaagctacnhcbhcwggacttttggcggagggaccaag

SEQ ID NO: 541 - DNA, 69 bp, Artificial Sequence
  Description of Artificial Sequence: Synthetic oligonucleotide
  modified_base (35)..(35): a, c, t or g
cctgaagattttgcaacttactactgtswmcaavnatacagtactwggacttttggcggagggaccaag

SEQ ID NO: 542 - DNA, 69 bp, Artificial Sequence
  Description of Artificial Sequence: Synthetic oligonucleotide
cctgaagattttgcaacttactactgtswmcaaagcbhcagtactwggacttttggcggagggaccaag

SEQ ID NO: 543 - DNA, 69 bp, Artificial Sequence
  Description of Artificial Sequence: Synthetic oligonucleotide
  modified_base (40)..(40): a, c, t or g
cctgaagattttgcaacttactactgtswmcaaagctacnhcactwggacttttggcggagggaccaag

SEQ ID NO: 544 - DNA, 69 bp, Artificial Sequence
  Description of Artificial Sequence: Synthetic oligonucleotide
cctgaagattttgcaacttactactgtswmcaaagctacagtbhcwggacttttggcggagggaccaag

SEQ ID NO: 545 - DNA, 69 bp, Artificial Sequence
  Description of Artificial Sequence: Synthetic oligonucleotide
  modified_base (35)..(35): a, c, t or g
cctgaagattttgcaacttactactgtcagswmvnatacagtactwggacttttggcggagggaccaag

SEQ ID NO: 546 - DNA, 69 bp, Artificial Sequence
  Description of Artificial Sequence: Synthetic oligonucleotide
cctgaagattttgcaacttactactgtcagswmagcbhcagtactwggacttttggcggagggaccaag

SEQ ID NO: 547 - DNA, 69 bp, Artificial Sequence
  Description of Artificial Sequence: Synthetic oligonucleotide
  modified_base (40)..(40): a, c, t or g
cctgaagattttgcaacttactactgtcagswmagctacnhcactwggacttttggcggagggaccaag

SEQ ID NO: 548 - DNA, 69 bp, Artificial Sequence
  Description of Artificial Sequence: Synthetic oligonucleotide
cctgaagattttgcaacttactactgtcagswmagctacagtbhcwggacttttggcggagggaccaag

SEQ ID NO: 549 - DNA, 69 bp, Artificial Sequence
  Description of Artificial Sequence: Synthetic oligonucleotide
cctgaagattttgcaacttactactgtswmswmagctacagtactcctacttttggcggagggaccaag

SEQ ID NO: 550 - DNA, 69 bp, Artificial Sequence
  Description of Artificial Sequence: Synthetic oligonucleotide
  modified_base (35)..(35): a, c, t or g
cctgaagattttgcaacttactactgtcagcaavnabhcagtactcctacttttggcggagggaccaag

SEQ ID NO: 551 - DNA, 69 bp, Artificial Sequence
  Description of Artificial Sequence: Synthetic oligonucleotide
  modified_base (35)..(35): a, c, t or g
  modified_base (40)..(40): a, c, t or g
cctgaagattttgcaacttactactgtcagcaavnatacnhcactcctacttttggcggagggaccaag

SEQ ID NO: 552 - DNA, 69 bp, Artificial Sequence
  Description of Artificial Sequence: Synthetic oligonucleotide
  modified_base (35)..(35): a, c, t or g
cctgaagattttgcaacttactactgtcagcaavnatacagtbhccctacttttggcggagggaccaag

SEQ ID NO: 553 - DNA, 69 bp, Artificial Sequence
  Description of Artificial Sequence: Synthetic oligonucleotide
  modified_base (40)..(40): a, c, t or g
cctgaagattttgcaacttactactgtcagcaaagcbhcnhcactcctacttttggcggagggaccaag

SEQ ID NO: 554 - DNA, 69 bp, Artificial Sequence
  Description of Artificial Sequence: Synthetic oligonucleotide
cctgaagattttgcaacttactactgtcagcaaagcbhcagtbhccctacttttggcggagggaccaag

SEQ ID NO: 555 - DNA, 69 bp, Artificial Sequence
  Description of Artificial Sequence: Synthetic oligonucleotide
  modified_base (40)..(40): a, c, t or g
cctgaagattttgcaacttactactgtcagcaaagctacnhcbhccctacttttggcggagggaccaag

SEQ ID NO: 556 - DNA, 69 bp, Artificial Sequence
  Description of Artificial Sequence: Synthetic oligonucleotide
  modified_base (35)..(35): a, c, t or g
cctgaagattttgcaacttactactgtswmcaavnatacagtactcctacttttggcggagggaccaag

SEQ ID NO: 557 - DNA, 69 bp, Artificial Sequence
  Description of Artificial Sequence: Synthetic oligonucleotide
cctgaagattttgcaacttactactgtswmcaaagcbhcagtactcctacttttggcggagggaccaag

SEQ ID NO: 558 - DNA, 69 bp, Artificial Sequence
  Description of Artificial Sequence: Synthetic oligonucleotide
  modified_base (40)..(40): a, c, t or g
cctgaagattttgcaacttactactgtswmcaaagctacnhcactcctacttttggcggagggaccaag

SEQ ID NO: 559 - DNA, 69 bp, Artificial Sequence
  Description of Artificial Sequence: Synthetic oligonucleotide
cctgaagattttgcaacttactactgtswmcaaagctacagtbhccctacttttggcggagggaccaag

SEQ ID NO: 560 - DNA, 69 bp, Artificial Sequence
  Description of Artificial Sequence: Synthetic oligonucleotide
  modified_base (35)..(35): a, c, t or g
cctgaagattttgcaacttactactgtcagswmvnatacagtactcctacttttggcggagggaccaag

SEQ ID NO: 561 - DNA, 69 bp, Artificial Sequence
  Description of Artificial Sequence: Synthetic oligonucleotide
cctgaagattttgcaacttactactgtcagswmagcbhcagtactcctacttttggcggagggaccaag

SEQ ID NO: 562 - DNA, 69 bp, Artificial Sequence
  Description of Artificial Sequence: Synthetic oligonucleotide
  modified_base (40)..(40): a, c, t or g
cctgaagattttgcaacttactactgtcagswmagctacnhcactcctacttttggcggagggaccaag

SEQ ID NO: 563 - DNA, 69 bp, Artificial Sequence
  Description of Artificial Sequence: Synthetic oligonucleotide
cctgaagattttgcaacttactactgtcagswmagctacagtbhccctacttttggcggagggaccaag

SEQ ID NO: 564 - DNA, 69 bp, Artificial Sequence
  Description of Artificial Sequence: Synthetic oligonucleotide
gctgaggatgttggggtttattactgcdtsswmgcactccagacttwcacttttggcggagggaccaag

SEQ ID NO: 565 - DNA, 69 bp, Artificial Sequence
  Description of Artificial Sequence: Synthetic oligonucleotide
  modified_base (35)..(35): a, c, t or g
  modified_base (38)..(38): a, c, t or g
gctgaggatgttggggtttattactgcatgcagvnamnacagacttwcacttttggcggagggaccaag

SEQ ID NO: 566 - DNA, 69 bp, Artificial Sequence
  Description of Artificial Sequence: Synthetic oligonucleotide
  modified_base (35)..(35): a, c, t or g
gctgaggatgttggggtttattactgcatgcagvnactcsrmacttwcacttttggcggagggaccaag

SEQ ID NO: 567 - DNA, 69 bp, Artificial Sequence
  Description of Artificial Sequence: Synthetic oligonucleotide
  modified_base (35)..(35): a, c, t or g
gctgaggatgttggggtttattactgcatgcagvnactccagvbctwcacttttggcggagggaccaag

SEQ ID NO: 568 - DNA, 69 bp, Artificial Sequence
  Description of Artificial Sequence: Synthetic oligonucleotide
  modified_base (38)..(38): a, c, t or g
gctgaggatgttggggtttattactgcatgcaggcamnasrmacttwcacttttggcggagggaccaag

SEQ ID NO: 569 - DNA, 69 bp, Artificial Sequence
  Description of Artificial Sequence: Synthetic oligonucleotide
  modified_base (38)..(38): a, c, t or g
gctgaggatgttggggtttattactgcatgcaggcamnacagvbctwcacttttggcggagggaccaag

SEQ ID NO: 570 - DNA, 69 bp, Artificial Sequence
  Description of Artificial Sequence: Synthetic oligonucleotide
gctgaggatgttggggtttattactgcatgcaggcactcsrmvbctwcacttttggcggagggaccaag

SEQ ID NO: 571 - DNA, 69 bp, Artificial Sequence
  Description of Artificial Sequence: Synthetic oligonucleotide
  modified_base (35)..(35): a, c, t or g
gctgaggatgttggggtttattactgcdtscagvnactccagacttwcacttttggcggagggaccaag

SEQ ID NO: 572 - DNA, 69 bp, Artificial Sequence
  Description of Artificial Sequence: Synthetic oligonucleotide
  modified_base (38)..(38): a, c, t or g
gctgaggatgttggggtttattactgcdtscaggcamnacagacttwcacttttggcggagggaccaag

SEQ ID NO: 573 - DNA, 69 bp, Artificial Sequence
  Description of Artificial Sequence: Synthetic oligonucleotide
gctgaggatgttggggtttattactgcdtscaggcactcsrmacttwcacttttggcggagggaccaag

SEQ ID NO: 574 - DNA, 69 bp, Artificial Sequence
  Description of Artificial Sequence: Synthetic oligonucleotide
gctgaggatgttggggtttattactgcdtscaggcactccagvbctwcacttttggcggagggaccaag

SEQ ID NO: 575 - DNA, 69 bp, Artificial Sequence
  Description of Artificial Sequence: Synthetic oligonucleotide
  modified_base (35)..(35): a, c, t or g
gctgaggatgttggggtttattactgcatgswmvnactccagacttwcacttttggcggagggaccaag

SEQ ID NO: 576 - DNA, 69 bp, Artificial Sequence
  Description of Artificial Sequence: Synthetic oligonucleotide
  modified_base (38)..(38): a, c, t or g
gctgaggatgttggggtttattactgcatgswmgcamnacagacttwcacttttggcggagggaccaag

SEQ ID NO: 577 - DNA, 69 bp, Artificial Sequence
  Description of Artificial Sequence: Synthetic oligonucleotide
gctgaggatgttggggtttattactgcatgswmgcactcsrmacttwcacttttggcggagggaccaag

SEQ ID NO: 578 - DNA, 69 bp, Artificial Sequence
  Description of Artificial Sequence: Synthetic oligonucleotide
gctgaggatgttggggtttattactgcatgswmgcactccagvbctwcacttttggcggagggaccaag

SEQ ID NO: 579 - DNA, 69 bp, Artificial Sequence
  Description of Artificial Sequence: Synthetic oligonucleotide
gctgaggatgttggggtttattactgcdtsswmgcactccagactmtcacttttggcggagggaccaag

SEQ ID NO: 580 - DNA, 69 bp, Artificial Sequence
  Description of Artificial Sequence: Synthetic oligonucleotide
  modified_base (35)..(35): a, c, t or g
  modified_base (38)..(38): a, c, t or g
gctgaggatgttggggtttattactgcatgcagvnamnacagactmtcacttttggcggagggaccaag

SEQ ID NO: 581 - DNA, 69 bp, Artificial Sequence
  Description of Artificial Sequence: Synthetic oligonucleotide
  modified_base (35)..(35): a, c, t or g
gctgaggatgttggggtttattactgcatgcagvnactcsrmactmtcacttttggcggagggaccaag

SEQ ID NO: 582 - DNA, 69 bp, Artificial Sequence
  Description of Artificial Sequence: Synthetic oligonucleotide
  modified_base (35)..(35): a, c, t or g
gctgaggatgttggggtttattactgcatgcagvnactccagvbcmtcacttttggcggagggaccaag

SEQ ID NO: 583 - DNA, 69 bp, Artificial Sequence
  Description of Artificial Sequence: Synthetic oligonucleotide
  modified_base (38)..(38): a, c, t or g
gctgaggatgttggggtttattactgcatgcaggcamnasrmactmtcacttttggcggagggaccaag

SEQ ID NO: 584 - DNA, 69 bp, Artificial Sequence
  Description of Artificial Sequence: Synthetic oligonucleotide
  modified_base (38)..(38): a, c, t or g
gctgaggatgttggggtttattactgcatgcaggcamnacagvbcmtcacttttggcggagggaccaag

SEQ ID NO: 585 - DNA, 69 bp, Artificial Sequence
  Description of Artificial Sequence: Synthetic oligonucleotide
gctgaggatgttggggtttattactgcatgcaggcactcsrmvbcmtcacttttggcggagggaccaag

SEQ ID NO: 586 - DNA, 69 bp, Artificial Sequence
  Description of Artificial Sequence: Synthetic oligonucleotide
  modified_base (35)..(35): a, c, t or g
gctgaggatgttggggtttattactgcdtscagvnactccagactmtcacttttggcggagggaccaag

SEQ ID NO: 587 - DNA, 69 bp, Artificial Sequence
  Description of Artificial Sequence: Synthetic oligonucleotide
  modified_base (38)..(38): a, c, t or g
gctgaggatgttggggtttattactgcdtscaggcamnacagactmtcacttttggcggagggaccaag

SEQ ID NO: 588 - DNA, 69 bp, Artificial Sequence
  Description of Artificial Sequence: Synthetic oligonucleotide
gctgaggatgttggggtttattactgcdtscaggcactcsrmactmtcacttttggcggagggaccaag

SEQ ID NO: 589 - DNA, 69 bp, Artificial Sequence
  Description of Artificial Sequence: Synthetic oligonucleotide
gctgaggatgttggggtttattactgcdtscaggcactccagvbcmtcacttttggcggagggaccaag

SEQ ID NO: 590 - DNA, 69 bp, Artificial Sequence
  Description of Artificial Sequence: Synthetic oligonucleotide
  modified_base (35)..(35): a, c, t or g
gctgaggatgttggggtttattactgcatgswmvnactccagactmtcacttttggcggagggaccaag

SEQ ID NO: 591 - DNA, 69 bp, Artificial Sequence
  Description of Artificial Sequence: Synthetic oligonucleotide
  modified_base (38)..(38): a, c, t or g
gctgaggatgttggggtttattactgcatgswmgcamnacagactmtcacttttggcggagggaccaag

SEQ ID NO: 592 - DNA, 69 bp, Artificial Sequence
  Description of Artificial Sequence: Synthetic oligonucleotide
gctgaggatgttggggtttattactgcatgswmgcactcsrmactmtcacttttggcggagggaccaag

SEQ ID NO: 593 - DNA, 69 bp, Artificial Sequence
  Description of Artificial Sequence: Synthetic oligonucleotide
gctgaggatgttggggtttattactgcatgswmgcactccagvbcmtcacttttggcggagggaccaag

SEQ ID NO: 594 - DNA, 69 bp, Artificial Sequence
  Description of Artificial Sequence: Synthetic oligonucleotide
gctgaggatgttggggtttattactgcdtsswmgcactccagactwggacttttggcggagggaccaag

SEQ ID NO: 595 - DNA, 69 bp, Artificial Sequence
  Description of Artificial Sequence: Synthetic oligonucleotide
  modified_base (35)..(35): a, c, t or g
  modified_base (38)..(38): a, c, t or g
gctgaggatgttggggtttattactgcatgcagvnamnacagactwggacttttggcggagggaccaag

SEQ ID NO: 596 - DNA, 69 bp, Artificial Sequence
  Description of Artificial Sequence: Synthetic oligonucleotide
  modified_base (35)..(35): a, c, t or g
gctgaggatgttggggtttattactgcatgcagvnactcsrmactwggacttttggcggagggaccaag

SEQ ID NO: 597 - DNA, 69 bp, Artificial Sequence
  Description of Artificial Sequence: Synthetic oligonucleotide
  modified_base (35)..(35): a, c, t or g
gctgaggatgttggggtttattactgcatgcagvnactccagvbcwggacttttggcggagggaccaag

SEQ ID NO: 598 - DNA, 69 bp, Artificial Sequence
  Description of Artificial Sequence: Synthetic oligonucleotide
  modified_base (38)..(38): a, c, t or g
gctgaggatgttggggtttattactgcatgcaggcamnasrmactwggacttttggcggagggaccaag

SEQ ID NO: 599 - DNA, 69 bp, Artificial Sequence
  Description of Artificial Sequence: Synthetic oligonucleotide
  modified_base (38)..(38): a, c, t or g
gctgaggatgttggggtttattactgcatgcaggcamnacagvbcwggacttttggcggagggaccaag

SEQ ID NO: 600 - DNA, 69 bp, Artificial Sequence
  Description of Artificial Sequence: Synthetic oligonucleotide
gctgaggatgttggggtttattactgcatgcaggcactcsrmvbcwggacttttggcggagggaccaag

SEQ ID NO: 601 - DNA, 69 bp, Artificial Sequence
  Description of Artificial Sequence: Synthetic oligonucleotide
  modified_base (35)..(35): a, c, t or g
gctgaggatgttggggtttattactgcdtscagvnactccagactwggacttttggcggagggaccaag

SEQ ID NO: 602 - DNA, 69 bp, Artificial Sequence
  Description of Artificial Sequence: Synthetic oligonucleotide
  modified_base (38)..(38): a, c, t or g
gctgaggatgttggggtttattactgcdtscaggcamnacagactwggacttttggcggagggaccaag

SEQ ID NO: 603 - DNA, 69 bp, Artificial Sequence
  Description of Artificial Sequence: Synthetic oligonucleotide
gctgaggatgttggggtttattactgcdtscaggcactcsrmactwggacttttggcggagggaccaag

SEQ ID NO: 604 - DNA, 69 bp, Artificial Sequence
  Description of Artificial Sequence: Synthetic oligonucleotide
gctgaggatgttggggtttattactgcdtscaggcactccagvbcwggacttttggcggagggaccaag

SEQ ID NO: 605 - DNA, 69 bp, Artificial Sequence
  Description of Artificial Sequence: Synthetic oligonucleotide
  modified_base (35)..(35): a, c, t or g
gctgaggatgttggggtttattactgcatgswmvnactccagactwggacttttggcggagggaccaag

SEQ ID NO: 606 - DNA, 69 bp, Artificial Sequence
  Description of Artificial Sequence: Synthetic oligonucleotide
  modified_base (38)..(38): a, c, t or g
gctgaggatgttggggtttattactgcatgswmgcamnacagactwggacttttggcggagggaccaag

SEQ ID NO: 607 - DNA, 69 bp, Artificial Sequence
  Description of Artificial Sequence: Synthetic oligonucleotide
gctgaggatgttggggtttattactgcatgswmgcactcsrmactwggacttttggcggagggaccaag

SEQ ID NO: 608 - DNA, 69 bp, Artificial Sequence
  Description of Artificial Sequence: Synthetic oligonucleotide
gctgaggatgttggggtttattactgcatgswmgcactccagvbcwggacttttggcggagggaccaag

SEQ ID NO: 609 - DNA, 69 bp, Artificial Sequence
  Description of Artificial Sequence: Synthetic oligonucleotide
gctgaggatgttggggtttattactgcdtsswmgcactccagactcctacttttggcggagggaccaag

SEQ ID NO: 610 - DNA, 69 bp, Artificial Sequence
  Description of Artificial Sequence: Synthetic oligonucleotide
  modified_base (35)..(35): a, c, t or g
  modified_base (38)..(38): a, c, t or g
gctgaggatgttggggtttattactgcatgcagvnamnacagactcctacttttggcggagggaccaag

SEQ ID NO: 611 - DNA, 69 bp, Artificial Sequence
  Description of Artificial Sequence: Synthetic oligonucleotide
  modified_base (35)..(35): a, c, t or g
gctgaggatgttggggtttattactgcatgcagvnactcsrmactcctacttttggcggagggaccaag

SEQ ID NO: 612 - DNA, 69 bp, Artificial Sequence
  Description of Artificial Sequence: Synthetic oligonucleotide
  modified_base (35)..(35): a, c, t or g
gctgaggatgttggggtttattactgcatgcagvnactccagvbccctacttttggcggagggaccaag

SEQ ID NO: 613 - DNA, 69 bp, Artificial Sequence
  Description of Artificial Sequence: Synthetic oligonucleotide
  modified_base (38)..(38): a, c, t or g
gctgaggatgttggggtttattactgcatgcaggcamnasrmactcctacttttggcggagggaccaag

SEQ ID NO: 614 - DNA, 69 bp, Artificial Sequence
  Description of Artificial Sequence: Synthetic oligonucleotide
  modified_base (38)..(38): a, c, t or g
gctgaggatgttggggtttattactgcatgcaggcamnacagvbccctacttttggcggagggaccaag

SEQ ID NO: 615 - DNA, 69 bp, Artificial Sequence
  Description of Artificial Sequence: Synthetic oligonucleotide
gctgaggatgttggggtttattactgcatgcaggcactcsrmvbccctacttttggcggagggaccaag

SEQ ID NO: 616 - DNA, 69 bp, Artificial Sequence
  Description of Artificial Sequence: Synthetic oligonucleotide
  modified_base (35)..(35): a, c, t or g
gctgaggatgttggggtttattactgcdtscagvnactccagactcctacttttggcggagggaccaag

SEQ ID NO: 617 - DNA, 69 bp, Artificial Sequence
  Description of Artificial Sequence: Synthetic oligonucleotide
  modified_base (38)..(38): a, c, t or g
gctgaggatgttggggtttattactgcdtscaggcamnacagactcctacttttggcggagggaccaag

SEQ ID NO: 618 - DNA, 69 bp, Artificial Sequence
  Description of Artificial Sequence: Synthetic oligonucleotide
gctgaggatgttggggtttattactgcdtscaggcactcsrmactcctacttttggcggagggaccaag

SEQ ID NO: 619 - DNA, 69 bp, Artificial Sequence
  Description of Artificial Sequence: Synthetic oligonucleotide
gctgaggatgttggggtttattactgcdtscaggcactccagvbccctacttttggcggagggaccaag

SEQ ID NO: 620 - DNA, 69 bp, Artificial Sequence
  Description of Artificial Sequence: Synthetic oligonucleotide
  modified_base (35)..(35): a, c, t or g
gctgaggatgttggggtttattactgcatgswmvnactccagactcctacttttggcggagggaccaag

SEQ ID NO: 621 - DNA, 69 bp, Artificial Sequence
  Description of Artificial Sequence: Synthetic oligonucleotide
  modified_base (38)..(38): a, c, t or g
gctgaggatgttggggtttattactgcatgswmgcamnacagactcctacttttggcggagggaccaag

SEQ ID NO: 622 - DNA, 69 bp, Artificial Sequence
  Description of Artificial Sequence: Synthetic oligonucleotide
gctgaggatgttggggtttattactgcatgswmgcactcsrmactcctacttttggcggagggaccaag

SEQ ID NO: 623 - DNA, 69 bp, Artificial Sequence
  Description of Artificial Sequence: Synthetic oligonucleotide
gctgaggatgttggggtttattactgcatgswmgcactccagvbccctacttttggcggagggaccaag

SEQ ID NO: 624 - DNA, 69 bp, Artificial Sequence
  Description of Artificial Sequence: Synthetic oligonucleotide
cctgaagattttgcagtttattactgtswmswmagaagtaattggtwcacttttggcggagggaccaag

SEQ ID NO: 625 - DNA, 69 bp, Artificial Sequence
  Description of Artificial Sequence: Synthetic oligonucleotide
  modified_base (37)..(37): a, c, t or g
cctgaagattttgcagtttattactgtcagcagbhcnhcaattggtwcacttttggcggagggaccaag

SEQ ID NO: 626 - DNA, 69 bp, Artificial Sequence
  Description of Artificial Sequence: Synthetic oligonucleotide
  modified_base (40)..(40): a, c, t or g
cctgaagattttgcagtttattactgtcagcagbhcagtnhctggtwcacttttggcggagggaccaag

SEQ ID NO: 627 - DNA, 69 bp, Artificial Sequence
  Description of Artificial Sequence: Synthetic oligonucleotide
cctgaagattttgcagtttattactgtcagcagbhcagtaatywctwcacttttggcggagggaccaag

SEQ ID NO: 628 - DNA, 69 bp, Artificial Sequence
  Description of Artificial Sequence: Synthetic oligonucleotide
  modified_base (37)..(37): a, c, t or g
  modified_base (40)..(40): a, c, t or g
cctgaagattttgcagtttattactgtcagcagaganhcnhctggtwcacttttggcggagggaccaag

SEQ ID NO: 629 - DNA, 69 bp, Artificial Sequence
  Description of Artificial Sequence: Synthetic oligonucleotide
  modified_base (37)..(37): a, c, t or g
cctgaagattttgcagtttattactgtcagcagaganhcaatywctwcacttttggcggagggaccaag

SEQ ID NO: 630 - DNA, 69 bp, Artificial Sequence
  Description of Artificial Sequence: Synthetic oligonucleotide
  modified_base (40)..(40): a, c, t or g
cctgaagattttgcagtttattactgtcagcagagaagtnhcywctwcacttttggcggagggaccaag

SEQ ID NO: 631 - DNA, 69 bp, Artificial Sequence
  Description of Artificial Sequence: Synthetic oligonucleotide
cctgaagattttgcagtttattactgtswmcagbhcagtaattggtwcacttttggcggagggaccaag

SEQ ID NO: 632 - DNA, 69 bp, Artificial Sequence
  Description of Artificial Sequence: Synthetic oligonucleotide
  modified_base (37)..(37): a, c, t or g
cctgaagattttgcagtttattactgtswmcagaganhcaattggtwcacttttggcggagggaccaag

SEQ ID NO: 633 - DNA, 69 bp, Artificial Sequence
  Description of Artificial Sequence: Synthetic oligonucleotide
  modified_base (40)..(40): a, c, t or g
cctgaagattttgcagtttattactgtswmcagagaagtnhctggtwcacttttggcggagggaccaag

SEQ ID NO: 634 - DNA, 69 bp, Artificial Sequence
  Description of Artificial Sequence: Synthetic oligonucleotide
cctgaagattttgcagtttattactgtswmcagagaagtaatywctwcacttttggcggagggaccaag

SEQ ID NO: 635 - DNA, 69 bp, Artificial Sequence
  Description of Artificial Sequence: Synthetic oligonucleotide
cctgaagattttgcagtttattactgtcagswmbhcagtaattggtwcacttttggcggagggaccaag

SEQ ID NO: 636 - DNA, 69 bp, Artificial Sequence
  Description of Artificial Sequence: Synthetic oligonucleotide
  modified_base (37)..(37): a, c, t or g
cctgaagattttgcagtttattactgtcagswmaganhcaattggtwcacttttggcggagggaccaag

SEQ ID NO: 637 - DNA, 69 bp, Artificial Sequence
  Description of Artificial Sequence: Synthetic oligonucleotide
  modified_base (40)..(40): a, c, t or g
cctgaagattttgcagtttattactgtcagswmagaagtnhctggtwcacttttggcggagggaccaag

SEQ ID NO: 638 - DNA, 69 bp, Artificial Sequence
  Description of Artificial Sequence: Synthetic oligonucleotide
cctgaagattttgcagtttattactgtcagswmagaagtaatywctwcacttttggcggagggaccaag

SEQ ID NO: 639 - DNA, 69 bp, Artificial Sequence
  Description of Artificial Sequence: Synthetic oligonucleotide
cctgaagattttgcagtttattactgtswmswmagaagtaattggmtcacttttggcggagggaccaag

SEQ ID NO: 640 - DNA, 69 bp, Artificial Sequence
  Description of Artificial Sequence: Synthetic oligonucleotide
  modified_base (37)..(37): a, c, t or g
cctgaagattttgcagtttattactgtcagcagbhcnhcaattggmtcacttttggcggagggaccaag

SEQ ID NO: 641 - DNA, 69 bp, Artificial Sequence
  Description of Artificial Sequence: Synthetic oligonucleotide
  modified_base (40)..(40): a, c, t or g
cctgaagattttgcagtttattactgtcagcagbhcagtnhctggmtcacttttggcggagggaccaag

SEQ ID NO: 642 - DNA, 69 bp, Artificial Sequence
  Description of Artificial Sequence: Synthetic oligonucleotide
cctgaagattttgcagtttattactgtcagcagbhcagtaatywcmtcacttttggcggagggaccaag

SEQ ID NO: 643 - DNA, 69 bp, Artificial Sequence
  Description of Artificial Sequence: Synthetic oligonucleotide
  modified_base (37)..(37): a, c, t or g
  modified_base (40)..(40): a, c, t or g
cctgaagattttgcagtttattactgtcagcagaganhcnhctggmtcacttttggcggagggaccaag

SEQ ID NO: 644 - DNA, 69 bp, Artificial Sequence
  Description of Artificial Sequence: Synthetic oligonucleotide
  modified_base (37)..(37): a, c, t or g
cctgaagattttgcagtttattactgtcagcagaganhcaatywcmtcacttttggcggagggaccaag

SEQ ID NO: 645 - DNA, 69 bp, Artificial Sequence
  Description of Artificial Sequence: Synthetic oligonucleotide
  modified_base (40)..(40): a, c, t or g
cctgaagattttgcagtttattactgtcagcagagaagtnhcywcmtcacttttggcggagggaccaag

SEQ ID NO: 646 - DNA, 69 bp, Artificial Sequence
  Description of Artificial Sequence: Synthetic oligonucleotide
cctgaagattttgcagtttattactgtswmcagbhcagtaattggmtcacttttggcggagggaccaag

SEQ ID NO: 647 - DNA, 69 bp, Artificial Sequence
  Description of Artificial Sequence: Synthetic oligonucleotide
  modified_base (37)..(37): a, c, t or g
cctgaagattttgcagtttattactgtswmcagaganhcaattggmtcacttttggcggagggaccaag

SEQ ID NO: 648 - DNA, 69 bp, Artificial Sequence
  Description of Artificial Sequence: Synthetic oligonucleotide
  modified_base (40)..(40): a, c, t or g
cctgaagattttgcagtttattactgtswmcagagaagtnhctggmtcacttttggcggagggaccaag

SEQ ID NO: 649 - DNA, 69 bp, Artificial Sequence
  Description of Artificial Sequence: Synthetic oligonucleotide
cctgaagattttgcagtttattactgtswmcagagaagtaatywcmtcacttttggcggagggaccaag

SEQ ID NO: 650 - DNA, 69 bp, Artificial Sequence
  Description of Artificial Sequence: Synthetic oligonucleotide
cctgaagattttgcagtttattactgtcagswmbhcagtaattggmtcacttttggcggagggaccaag

SEQ ID NO: 651 - DNA, 69 bp, Artificial Sequence
  Description of Artificial Sequence: Synthetic oligonucleotide
  modified_base (37)..(37): a, c, t or g
cctgaagattttgcagtttattactgtcagswmaganhcaattggmtcacttttggcggagggaccaag

SEQ ID NO: 652 - DNA, 69 bp, Artificial Sequence
  Description of Artificial Sequence: Synthetic oligonucleotide
  modified_base (40)..(40): a, c, t or g
cctgaagattttgcagtttattactgtcagswmagaagtnhctggmtcacttttggcggagggaccaag

SEQ ID NO: 653 - DNA, 69 bp, Artificial Sequence
  Description of Artificial Sequence: Synthetic oligonucleotide
cctgaagattttgcagtttattactgtcagswmagaagtaatywcmtcacttttggcggagggaccaag

SEQ ID NO: 654 - DNA, 69 bp, Artificial Sequence
  Description of Artificial Sequence: Synthetic oligonucleotide
cctgaagattttgcagtttattactgtswmswmagaagtaattggwggacttttggcggagggaccaag

SEQ ID NO: 655 - DNA, 69 bp, Artificial Sequence
  Description of Artificial Sequence: Synthetic oligonucleotide
  modified_base (37)..(37): a, c, t or g
cctgaagattttgcagtttattactgtcagcagbhcnhcaattggwggacttttggcggagggaccaag

SEQ ID NO: 656 - DNA, 69 bp, Artificial Sequence
  Description of Artificial Sequence: Synthetic oligonucleotide
  modified_base (40)..(40): a, c, t or g
cctgaagattttgcagtttattactgtcagcagbhcagtnhctggwggacttttggcggagggaccaag

SEQ ID NO: 657 - DNA, 69 bp, Artificial Sequence
  Description of Artificial Sequence: Synthetic oligonucleotide
cctgaagattttgcagtttattactgtcagcagbhcagtaatywcwggacttttggcggagggaccaag

SEQ ID NO: 658 - DNA, 69 bp, Artificial Sequence
  Description of Artificial Sequence: Synthetic oligonucleotide
  modified_base (37)..(37): a, c, t or g
  modified_base (40)..(40): a, c, t or g
cctgaagattttgcagtttattactgtcagcagaganhcnhctggwggacttttggcggagggaccaag

SEQ ID NO: 659 - DNA, 69 bp, Artificial Sequence
  Description of Artificial Sequence: Synthetic oligonucleotide
  modified_base (37)..(37): a, c, t or g
cctgaagattttgcagtttattactgtcagcagaganhcaatywcwggacttttggcggagggaccaag

SEQ ID NO: 660 - DNA, 69 bp, Artificial Sequence
  Description of Artificial Sequence: Synthetic oligonucleotide
  modified_base (40)..(40): a, c, t or g
cctgaagattttgcagtttattactgtcagcagagaagtnhcywcwggacttttggcggagggaccaag

SEQ ID NO: 661 - DNA, 69 bp, Artificial Sequence
  Description of Artificial Sequence: Synthetic oligonucleotide
cctgaagattttgcagtttattactgtswmcagbhcagtaattggwggacttttggcggagggaccaag

SEQ ID NO: 662 - DNA, 69 bp, Artificial Sequence
  Description of Artificial Sequence: Synthetic oligonucleotide
  modified_base (37)..(37): a, c, t or g
cctgaagattttgcagtttattactgtswmcagaganhcaattggwggacttttggcggagggaccaag

SEQ ID NO: 663 - DNA, 69 bp, Artificial Sequence
  Description of Artificial Sequence: Synthetic oligonucleotide
  modified_base (40)..(40): a, c, t or g
cctgaagattttgcagtttattactgtswmcagagaagtnhctggwggacttttggcggagggaccaag

SEQ ID NO: 664 - DNA, 69 bp, Artificial Sequence
  Description of Artificial Sequence: Synthetic oligonucleotide
cctgaagattttgcagtttattactgtswmcagagaagtaatywcwggacttttggcggagggaccaag

SEQ ID NO: 665 - DNA, 69 bp, Artificial Sequence
  Description of Artificial Sequence: Synthetic oligonucleotide
cctgaagattttgcagtttattactgtcagswmbhcagtaattggwggacttttggcggagggaccaag

SEQ ID NO: 666 - DNA, 69 bp, Artificial Sequence
  Description of Artificial Sequence: Synthetic oligonucleotide
  modified_base (37)..(37): a, c, t or g
cctgaagattttgcagtttattactgtcagswmaganhcaattggwggacttttggcggagggaccaag

SEQ ID NO: 667 - DNA, 69 bp, Artificial Sequence
  Description of Artificial Sequence: Synthetic oligonucleotide
  modified_base (40)..(40): a, c, t or g
cctgaagattttgcagtttattactgtcagswmagaagtnhctggwggacttttggcggagggaccaag

SEQ ID NO: 668 - DNA, 69 bp, Artificial Sequence
  Description of Artificial Sequence: Synthetic oligonucleotide
cctgaagattttgcagtttattactgtcagswmagaagtaatywcwggacttttggcggagggaccaag

SEQ ID NO: 669 - DNA, 69 bp, Artificial Sequence
  Description of Artificial Sequence: Synthetic oligonucleotide
cctgaagattttgcagtttattactgtswmswmagaagtaattggcctacttttggcggagggaccaag

SEQ ID NO: 670 - DNA, 69 bp, Artificial Sequence
  Description of Artificial Sequence: Synthetic oligonucleotide
  modified_base (37)..(37): a, c, t or g
cctgaagattttgcagtttattactgtcagcagbhcnhcaattggcctacttttggcggagggaccaag

SEQ ID NO: 671 - DNA, 69 bp, Artificial Sequence
  Description of Artificial Sequence: Synthetic oligonucleotide
  modified_base (40)..(40): a, c, t or g
cctgaagattttgcagtttattactgtcagcagbhcagtnhctggcctacttttggcggagggaccaag

SEQ ID NO: 672 - DNA, 69 bp, Artificial Sequence
  Description of Artificial Sequence: Synthetic oligonucleotide
cctgaagattttgcagtttattactgtcagcagbhcagtaatywccctacttttggcggagggaccaag

SEQ ID NO: 673 - DNA, 69 bp, Artificial Sequence
  Description of Artificial Sequence: Synthetic oligonucleotide
  modified_base (37)..(37): a, c, t or g
  modified_base (40)..(40): a, c, t or g
cctgaagattttgcagtttattactgtcagcagaganhcnhctggcctacttttggcggagggaccaag

SEQ ID NO: 674 - DNA, 69 bp, Artificial Sequence
  Description of Artificial Sequence: Synthetic oligonucleotide
  modified_base (37)..(37): a, c, t or g
cctgaagattttgcagtttattactgtcagcagaganhcaatywccctacttttggcggagggaccaag

SEQ ID NO: 675 - DNA, 69 bp, Artificial Sequence
  Description of Artificial Sequence: Synthetic oligonucleotide
  modified_base (40)..(40): a, c, t or g
cctgaagattttgcagtttattactgtcagcagagaagtnhcywccctacttttggcggagggaccaag

SEQ ID NO: 676 - DNA, 69 bp, Artificial Sequence
  Description of Artificial Sequence: Synthetic oligonucleotide
cctgaagattttgcagtttattactgtswmcagbhcagtaattggcctacttttggcggagggaccaag

SEQ ID NO: 677 - DNA, 69 bp, Artificial Sequence
  Description of Artificial Sequence: Synthetic oligonucleotide
  modified_base (37)..(37): a, c, t or g
cctgaagattttgcagtttattactgtswmcagaganhcaattggcctacttttggcggagggaccaag

SEQ ID NO: 678 - DNA, 69 bp, Artificial Sequence
  Description of Artificial Sequence: Synthetic oligonucleotide
  modified_base (40)..(40): a, c, t or g
cctgaagattttgcagtttattactgtswmcagagaagtnhctggcctacttttggcggagggaccaag

SEQ ID NO: 679 - DNA, 69 bp, Artificial Sequence
  Description of Artificial Sequence: Synthetic oligonucleotide
cctgaagattttgcagtttattactgtswmcagagaagtaatywccctacttttggcggagggaccaag

SEQ ID NO: 680 - DNA, 69 bp, Artificial Sequence
  Description of Artificial Sequence: Synthetic oligonucleotide
cctgaagattttgcagtttattactgtcagswmbhcagtaattggcctacttttggcggagggaccaag

SEQ ID NO: 681 - DNA, 69 bp, Artificial Sequence
  Description of Artificial Sequence: Synthetic oligonucleotide
  modified_base (37)..(37): a, c, t or g
cctgaagattttgcagtttattactgtcagswmaganhcaattggcctacttttggcggagggaccaag

SEQ ID NO: 682 - DNA, 69 bp, Artificial Sequence
  Description of Artificial Sequence: Synthetic oligonucleotide
  modified_base (40)..(40): a, c, t or g
cctgaagattttgcagtttattactgtcagswmagaagtnhctggcctacttttggcggagggaccaag

SEQ ID NO: 683 - DNA, 69 bp, Artificial Sequence
  Description of Artificial Sequence: Synthetic oligonucleotide
cctgaagattttgcagtttattactgtcagswmagaagtaatywccctacttttggcggagggaccaag

SEQ ID NO: 684 - DNA, 72 bp, Artificial Sequence
  Description of Artificial Sequence: Synthetic oligonucleotide
cagtctgaagattttgcagtttattactgtswmswmtacaataattggtwcacttttggcggagggaccaag

SEQ ID NO: 685 - DNA, 72 bp, Artificial Sequence
  Description of Artificial Sequence: Synthetic oligonucleotide
  modified_base (40)..(40): a, c, t or g
cagtctgaagattttgcagtttattactgtcagcagbhcnhcaattggtwcacttttggcggagggaccaag

SEQ ID NO: 686 - DNA, 72 bp, Artificial Sequence
  Description of Artificial Sequence: Synthetic oligonucleotide
  modified_base (43)..(43): a, c, t or g
cagtctgaagattttgcagtttattactgtcagcagbhcaatnhctggtwcacttttggcggagggaccaag

SEQ ID NO: 687 - DNA, 72 bp, Artificial Sequence
  Description of Artificial Sequence: Synthetic oligonucleotide
cagtctgaagattttgcagtttattactgtcagcagbhcaataatywctwcacttttggcggagggaccaag

SEQ ID NO: 688 - DNA, 72 bp, Artificial Sequence
  Description of Artificial Sequence: Synthetic oligonucleotide
  modified_base (40)..(40): a, c, t or g
  modified_base (43)..(43): a, c, t or g
cagtctgaagattttgcagtttattactgtcagcagtacnhcnhctggtwcacttttggcggagggaccaag

SEQ ID NO: 689 - DNA, 72 bp, Artificial Sequence
  Description of Artificial Sequence: Synthetic oligonucleotide
  modified_base (40)..(40): a, c, t or g
cagtctgaagattttgcagtttattactgtcagcagtacnhcaatywctwcacttttggcggagggaccaag

SEQ ID NO: 690 - DNA, 72 bp, Artificial Sequence
  Description of Artificial Sequence: Synthetic oligonucleotide
  modified_base (43)..(43): a, c, t or g
cagtctgaagattttgcagtttattactgtcagcagtacaatnhcywctwcacttttggcggagggaccaag

SEQ ID NO: 691 - DNA, 72 bp, Artificial Sequence
  Description of Artificial Sequence: Synthetic oligonucleotide
cagtctgaagattttgcagtttattactgtswmcagbhcaataattggtwcacttttggcggagggaccaag

SEQ ID NO: 692 - DNA, 72 bp, Artificial Sequence
  Description of Artificial Sequence: Synthetic oligonucleotide
  modified_base (40)..(40): a, c, t or g
cagtctgaagattttgcagtttattactgtswmcagtacnhcaattggtwcacttttggcggagggaccaag

SEQ ID NO: 693 - DNA, 72 bp, Artificial Sequence
  Description of Artificial Sequence: Synthetic oligonucleotide
  modified_base (43)..(43): a, c, t or g
cagtctgaagattttgcagtttattactgtswmcagtacaatnhctggtwcacttttggcggagggaccaag

SEQ ID NO: 694 - DNA, 72 bp, Artificial Sequence
  Description of Artificial Sequence: Synthetic oligonucleotide
cagtctgaagattttgcagtttattactgtswmcagtacaataatywctwcacttttggcggagggaccaag

SEQ ID NO: 695 - DNA, 72 bp, Artificial Sequence
  Description of Artificial Sequence: Synthetic oligonucleotide
cagtctgaagattttgcagtttattactgtcagswmbhcaataattggtwcacttttggcggagggaccaag

SEQ ID NO: 696 - DNA, 72 bp, Artificial Sequence
  Description of Artificial Sequence: Synthetic oligonucleotide
  modified_base (40)..(40): a, c, t or g
cagtctgaagattttgcagtttattactgtcagswmtacnhcaattggtwcacttttggcggagggaccaag

SEQ ID NO: 697 - DNA, 72 bp, Artificial Sequence
  Description of Artificial Sequence: Synthetic oligonucleotide
  modified_base (43)..(43): a, c, t or g
cagtctgaagattttgcagtttattactgtcagswmtacaatnhctggtwcacttttggcggagggaccaag

SEQ ID NO: 698 - DNA, 72 bp, Artificial Sequence
  Description of Artificial Sequence: Synthetic oligonucleotide
cagtctgaagattttgcagtttattactgtcagswmtacaataatywctwcacttttggcggagggaccaag

SEQ ID NO: 699 - DNA, 72 bp, Artificial Sequence
  Description of Artificial Sequence: Synthetic oligonucleotide
cagtctgaagattttgcagtttattactgtswmswmtacaataattggmtcacttttggcggagggaccaag

SEQ ID NO: 700 - DNA, 72 bp, Artificial Sequence
  Description of Artificial Sequence: Synthetic oligonucleotide
  modified_base (40)..(40): a, c, t or g
cagtctgaagattttgcagtttattactgtcagcagbhcnhcaattggmtcacttttggcggagggaccaag

SEQ ID NO: 701 - DNA, 72 bp, Artificial Sequence
  Description of Artificial Sequence: Synthetic oligonucleotide
  modified_base (43)..(43): a, c, t or g
cagtctgaagattttgcagtttattactgtcagcagbhcaatnhctggmtcacttttggcggagggaccaag

SEQ ID NO: 702 - DNA, 72 bp, Artificial Sequence
  Description of Artificial Sequence: Synthetic oligonucleotide
cagtctgaagattttgcagtttattactgtcagcagbhcaataatywcmtcacttttggcggagggaccaag

SEQ ID NO: 703 - DNA, 72 bp, Artificial Sequence
  Description of Artificial Sequence: Synthetic oligonucleotide
  modified_base (40)..(40): a, c, t or g
  modified_base (43)..(43): a, c, t or g
cagtctgaagattttgcagtttattactgtcagcagtacnhcnhctggmtcacttttggcggagggaccaag

SEQ ID NO: 704 - DNA, 72 bp, Artificial Sequence
  Description of Artificial Sequence: Synthetic oligonucleotide
  modified_base (40)..(40): a, c, t or g
cagtctgaagattttgcagtttattactgtcagcagtacnhcaatywcmtcacttttggcggagggaccaag

SEQ ID NO: 705 - DNA, 72 bp, Artificial Sequence
  Description of Artificial Sequence: Synthetic oligonucleotide
  modified_base (43)..(43): a, c, t or g
cagtctgaagattttgcagtttattactgtcagcagtacaatnhcywcmtcacttttggcggagggaccaag

SEQ ID NO: 706 - DNA, 72 bp, Artificial Sequence
  Description of Artificial Sequence: Synthetic oligonucleotide
cagtctgaagattttgcagtttattactgtswmcagbhcaataattggmtcacttttggcggagggaccaag

SEQ ID NO: 707 - DNA, 72 bp, Artificial Sequence
  Description of Artificial Sequence: Synthetic oligonucleotide
  modified_base (40)..(40): a, c, t or g
cagtctgaagattttgcagtttattactgtswmcagtacnhcaattggmtcacttttggcggagggaccaag

SEQ ID NO: 708 - DNA, 72 bp, Artificial Sequence
  Description of Artificial Sequence: Synthetic oligonucleotide
  modified_base (43)..(43): a, c, t or g
cagtctgaagattttgcagtttattactgtswmcagtacaatnhctggmtcacttttggcggagggaccaag

SEQ ID NO: 709 - DNA, 72 bp, Artificial Sequence
  Description of Artificial Sequence: Synthetic oligonucleotide
cagtctgaagattttgcagtttattactgtswmcagtacaataatywcmtcacttttggcggagggaccaag

SEQ ID NO: 710 - DNA, 72 bp, Artificial Sequence
  Description of Artificial Sequence: Synthetic oligonucleotide
cagtctgaagattttgcagtttattactgtcagswmbhcaataattggmtcacttttggcggagggaccaag

SEQ ID NO: 711 - DNA, 72 bp, Artificial Sequence
  Description of Artificial Sequence: Synthetic oligonucleotide
  modified_base (40)..(40): a, c, t or g
cagtctgaagattttgcagtttattactgtcagswmtacnhcaattggmtcacttttggcggagggaccaag

SEQ ID NO: 712 - DNA, 72 bp, Artificial Sequence
  Description of Artificial Sequence: Synthetic oligonucleotide
  modified_base (43)..(43): a, c, t or g
cagtctgaagattttgcagtttattactgtcagswmtacaatnhctggmtcacttttggcggagggaccaag

SEQ ID NO: 713 - DNA, 72 bp, Artificial Sequence
  Description of Artificial Sequence: Synthetic oligonucleotide
cagtctgaagattttgcagtttattactgtcagswmtacaataatywcmtcacttttggcggagggaccaag

SEQ ID NO: 714 - DNA, 72 bp, Artificial Sequence
  Description of Artificial Sequence: Synthetic oligonucleotide
cagtctgaagattttgcagtttattactgtswmswmtacaataattggwggacttttggcggagggaccaag

SEQ ID NO: 715 - DNA, 72 bp, Artificial Sequence
  Description of Artificial Sequence: Synthetic oligonucleotide
  modified_base (40)..(40): a, c, t or g
cagtctgaagattttgcagtttattactgtcagcagbhcnhcaattggwggacttttggcggagggaccaag

SEQ ID NO: 716 - DNA, 72 bp, Artificial Sequence
  Description of Artificial Sequence: Synthetic oligonucleotide
  modified_base (43)..(43): a, c, t or g
cagtctgaagattttgcagtttattactgtcagcagbhcaatnhctggwggacttttggcggagggaccaag

SEQ ID NO: 717 - DNA, 72 bp, Artificial Sequence
  Description of Artificial Sequence: Synthetic oligonucleotide
cagtctgaagattttgcagtttattactgtcagcagbhcaataatywcwggacttttggcggagggaccaag

SEQ ID NO: 718 - DNA, 72 bp, Artificial Sequence
  Description of Artificial Sequence: Synthetic oligonucleotide
  modified_base (40)..(40): a, c, t or g
  modified_base (43)..(43): a, c, t or g
cagtctgaagattttgcagtttattactgtcagcagtacnhcnhctggwggacttttggcggagggaccaag

SEQ ID NO: 719 - DNA, 72 bp, Artificial Sequence
  Description of Artificial Sequence: Synthetic oligonucleotide
  modified_base (40)..(40): a, c, t or g
cagtctgaagattttgcagtttattactgtcagcagtacnhcaatywcwggacttttggcggagggaccaag

SEQ ID NO: 720 - DNA, 72 bp, Artificial Sequence
  Description of Artificial Sequence: Synthetic oligonucleotide
  modified_base (43)..(43): a, c, t or g
cagtctgaagattttgcagtttattactgtcagcagtacaatnhcywcwggacttttggcggagggaccaag

SEQ ID NO: 721 - DNA, 72 bp, Artificial Sequence
  Description of Artificial Sequence: Synthetic oligonucleotide
cagtctgaagattttgcagtttattactgtswmcagbhcaataattggwggacttttggcggagggaccaag

SEQ ID NO: 722 - DNA, 72 bp, Artificial Sequence
  Description of Artificial Sequence: Synthetic oligonucleotide
  modified_base (40)..(40): a, c, t or g
cagtctgaagattttgcagtttattactgtswmcagtacnhcaattggwggacttttggcggagggaccaag

SEQ ID NO: 723 - DNA, 72 bp, Artificial Sequence
  Description of Artificial Sequence: Synthetic oligonucleotide
  modified_base (43)..(43): a, c, t or g
cagtctgaagattttgcagtttattactgtswmcagtacaatnhctggwggacttttggcggagggaccaag

SEQ ID NO: 724 - DNA, 72 bp, Artificial Sequence
  Description of Artificial Sequence: Synthetic oligonucleotide
cagtctgaagattttgcagtttattactgtswmcagtacaataatywcwggacttttggcggagggaccaag

SEQ ID NO: 725 - DNA, 72 bp, Artificial Sequence
  Description of Artificial Sequence: Synthetic oligonucleotide
cagtctgaagattttgcagtttattactgtcagswmbhcaataattggwggacttttggcggagggaccaag

SEQ ID NO: 726 - DNA, 72 bp, Artificial Sequence
  Description of Artificial Sequence: Synthetic oligonucleotide
  modified_base (40)..(40): a, c, t or g
cagtctgaagattttgcagtttattactgtcagswmtacnhcaattggwggacttttggcggagggaccaag

SEQ ID NO: 727 - DNA, 72 bp, Artificial Sequence
  Description of Artificial Sequence: Synthetic oligonucleotide
  modified_base (43)..(43): a, c, t or g
cagtctgaagattttgcagtttattactgtcagswmtacaatnhctggwggacttttggcggagggaccaag

SEQ ID NO: 728 - DNA, 72 bp, Artificial Sequence
  Description of Artificial Sequence: Synthetic oligonucleotide
cagtctgaagattttgcagtttattactgtcagswmtacaataatywcwggacttttggcggagggaccaag

SEQ ID NO: 729 - DNA, 72 bp, Artificial Sequence
  Description of Artificial Sequence: Synthetic oligonucleotide
cagtctgaagattttgcagtttattactgtswmswmtacaataattggcctacttttggcggagggaccaag

SEQ ID NO: 730 - DNA, 72 bp, Artificial Sequence
  Description of Artificial Sequence: Synthetic oligonucleotide
  modified_base (40)..(40): a, c, t or g
cagtctgaagattttgcagtttattactgtcagcagbhcnhcaattggcctacttttggcggagggaccaag

SEQ ID NO: 731 - DNA, 72 bp, Artificial Sequence
  Description of Artificial Sequence: Synthetic oligonucleotide
  modified_base (43)..(43): a, c, t or g
cagtctgaagattttgcagtttattactgtcagcagbhcaatnhctggcctacttttggcggagggaccaag

SEQ ID NO: 732 - DNA, 72 bp, Artificial Sequence
  Description of Artificial Sequence: Synthetic oligonucleotide
cagtctgaagattttgcagtttattactgtcagcagbhcaataatywccctacttttggcggagggaccaag

SEQ ID NO: 733 - DNA, 72 bp, Artificial Sequence
  Description of Artificial Sequence: Synthetic oligonucleotide
  modified_base (40)..(40): a, c, t or g
  modified_base (43)..(43): a, c, t or g
cagtctgaagattttgcagtttattactgtcagcagtacnhcnhctggcctacttttggcggagggaccaag

SEQ ID NO: 734 - DNA, 72 bp, Artificial Sequence
  Description of Artificial Sequence: Synthetic oligonucleotide
  modified_base (40)..(40): a, c, t or g
cagtctgaagattttgcagtttattactgtcagcagtacnhcaatywccctacttttggcggagggaccaag

SEQ ID NO: 735 - DNA, 72 bp, Artificial Sequence
  Description of Artificial Sequence: Synthetic oligonucleotide
  modified_base (43)..(43): a, c, t or g
cagtctgaagattttgcagtttattactgtcagcagtacaatnhcywccctacttttggcggagggaccaag

SEQ ID NO: 736 - DNA, 72 bp, Artificial Sequence
  Description of Artificial Sequence: Synthetic oligonucleotide
cagtctgaagattttgcagtttattactgtswmcagbhcaataattggcctacttttggcggagggaccaag

SEQ ID NO: 737 - DNA, 72 bp, Artificial Sequence
  Description of Artificial Sequence: Synthetic oligonucleotide
  modified_base (40)..(40): a, c, t or g
cagtctgaagattttgcagtttattactgtswmcagtacnhcaattggcctacttttggcggagggaccaag

SEQ ID NO: 738 - DNA, 72 bp, Artificial Sequence
  Description of Artificial Sequence: Synthetic oligonucleotide
  modified_base (43)..(43): a, c, t or g
cagtctgaagattttgcagtttattactgtswmcagtacaatnhctggcctacttttggcggagggaccaag

SEQ ID NO: 739 - DNA, 72 bp, Artificial Sequence
  Description of Artificial Sequence: Synthetic oligonucleotide
cagtctgaagattttgcagtttattactgtswmcagtacaataatywccctacttttggcggagggaccaag

SEQ ID NO: 740 - DNA, 72 bp, Artificial Sequence
  Description of Artificial Sequence: Synthetic oligonucleotide
cagtctgaagattttgcagtttattactgtcagswmbhcaataattggcctacttttggcggagggaccaag

SEQ ID NO: 741 - DNA, 72 bp, Artificial Sequence
  Description of Artificial Sequence: Synthetic oligonucleotide
  modified_base (40)..(40): a, c, t or g
cagtctgaagattttgcagtttattactgtcagswmtacnhcaattggcctacttttggcggagggaccaag

SEQ ID NO: 742 - DNA, 72 bp, Artificial Sequence
  Description of Artificial Sequence: Synthetic oligonucleotide
  modified_base (43)..(43): a, c, t or g
cagtctgaagattttgcagtttattactgtcagswmtacaatnhctggcctacttttggcggagggaccaag

SEQ ID NO: 743 - DNA, 72 bp, Artificial Sequence
  Description of Artificial Sequence: Synthetic oligonucleotide
cagtctgaagattttgcagtttattactgtcagswmtacaataatywccctacttttggcggagggaccaag

SEQ ID NO: 744 - DNA, 69 bp, Artificial Sequence
  Description of Artificial Sequence: Synthetic oligonucleotide
cctgaagattttgcagtgtattactgtswmswmtacggaagtagttwcacttttggcggagggaccaag

SEQ ID NO: 745 - DNA, 69 bp, Artificial Sequence
  Description of Artificial Sequence: Synthetic oligonucleotide
cctgaagattttgcagtgtattactgtcagcagbhcbhcagtagttwcacttttggcggagggaccaag

SEQ ID NO: 746 - DNA, 69 bp, Artificial Sequence
  Description of Artificial Sequence: Synthetic oligonucleotide
  modified_base (41)..(41): a, c, t or g
cctgaagattttgcagtgtattactgtcagcagbhcggavncagttwcacttttggcggagggaccaag

SEQ ID NO: 747 - DNA, 69 bp, Artificial Sequence
  Description of Artificial Sequence: Synthetic oligonucleotide
cctgaagattttgcagtgtattactgtcagcagbhcggaagtbhctwcacttttggcggagggaccaag

SEQ ID NO: 748 - DNA, 69 bp, Artificial Sequence
  Description of Artificial Sequence: Synthetic oligonucleotide
  modified_base (41)..(41): a, c, t or g
cctgaagattttgcagtgtattactgtcagcagtacbhcvncagttwcacttttggcggagggaccaag

SEQ ID NO: 749 - DNA, 69 bp, Artificial Sequence
  Description of Artificial Sequence: Synthetic oligonucleotide
cctgaagattttgcagtgtattactgtcagcagtacbhcagtbhctwcacttttggcggagggaccaag

SEQ ID NO: 750 - DNA, 69 bp, Artificial Sequence
  Description of Artificial Sequence: Synthetic oligonucleotide
  modified_base (41)..(41): a, c, t or g
cctgaagattttgcagtgtattactgtcagcagtacggavncbhctwcacttttggcggagggaccaag

SEQ ID NO: 751 - DNA, 69 bp, Artificial Sequence
  Description of Artificial Sequence: Synthetic oligonucleotide
cctgaagattttgcagtgtattactgtswmcagbhcggaagtagttwcacttttggcggagggaccaag

SEQ ID NO: 752 - DNA, 69 bp, Artificial Sequence
  Description of Artificial Sequence: Synthetic oligonucleotide
cctgaagattttgcagtgtattactgtswmcagtacbhcagtagttwcacttttggcggagggaccaag

SEQ ID NO: 753 - DNA, 69 bp, Artificial Sequence
  Description of Artificial Sequence: Synthetic oligonucleotide
  modified_base (41)..(41): a, c, t or g
cctgaagattttgcagtgtattactgtswmcagtacggavncagttwcacttttggcggagggaccaag

SEQ ID NO: 754 - DNA, 69 bp, Artificial Sequence
  Description of Artificial Sequence: Synthetic oligonucleotide
cctgaagattttgcagtgtattactgtswmcagtacggaagtbhctwcacttttggcggagggaccaag

SEQ ID NO: 755 - DNA, 69 bp, Artificial Sequence
  Description of Artificial Sequence: Synthetic oligonucleotide
cctgaagattttgcagtgtattactgtcagswmbhcggaagtagttwcacttttggcggagggaccaag

SEQ ID NO: 756 - DNA, 69 bp, Artificial Sequence
  Description of Artificial Sequence: Synthetic oligonucleotide
cctgaagattttgcagtgtattactgtcagswmtacbhcagtagttwcacttttggcggagggaccaag

SEQ ID NO: 757 - DNA, 69 bp, Artificial Sequence
  Description of Artificial Sequence: Synthetic oligonucleotide
  modified_base (41)..(41): a, c, t or g
cctgaagattttgcagtgtattactgtcagswmtacggavncagttwcacttttggcggagggaccaag

SEQ ID NO: 758 - DNA, 69 bp, Artificial Sequence
  Description of Artificial Sequence: Synthetic oligonucleotide
cctgaagattttgcagtgtattactgtcagswmtacggaagtbhctwcacttttggcggagggaccaag

SEQ ID NO: 759 - DNA, 69 bp, Artificial Sequence
  Description of Artificial Sequence: Synthetic oligonucleotide
cctgaagattttgcagtgtattactgtswmswmtacggaagtagtmtcacttttggcggagggaccaag

SEQ ID NO: 760 - DNA, 69 bp, Artificial Sequence
  Description of Artificial Sequence: Synthetic oligonucleotide
cctgaagattttgcagtgtattactgtcagcagbhcbhcagtagtmtcacttttggcggagggaccaag

SEQ ID NO: 761 - DNA, 69 bp, Artificial Sequence
  Description of Artificial Sequence: Synthetic oligonucleotide
  modified_base (41)..(41): a, c, t or g
cctgaagattttgcagtgtattactgtcagcagbhcggavncagtmtcacttttggcggagggaccaag

SEQ ID NO: 762 - DNA, 69 bp, Artificial Sequence
  Description of Artificial Sequence: Synthetic oligonucleotide
cctgaagattttgcagtgtattactgtcagcagbhcggaagtbhcmtcacttttggcggagggaccaag

SEQ ID NO: 763 - DNA, 69 bp, Artificial Sequence
  Description of Artificial Sequence: Synthetic oligonucleotide
  modified_base (41)..(41): a, c, t or g
cctgaagattttgcagtgtattactgtcagcagtacbhcvncagtmtcacttttggcggagggaccaag

SEQ ID NO: 764 - DNA, 69 bp, Artificial Sequence
  Description of Artificial Sequence: Synthetic oligonucleotide
cctgaagattttgcagtgtattactgtcagcagtacbhcagtbhcmtcacttttggcggagggaccaag

SEQ ID NO: 765 - DNA, 69 bp, Artificial Sequence
  Description of Artificial Sequence: Synthetic oligonucleotide
  modified_base (41)..(41): a, c, t or g
cctgaagattttgcagtgtattactgtcagcagtacggavncbhcmtcacttttggcggagggaccaag

SEQ ID NO: 766 - DNA, 69 bp, Artificial Sequence
  Description of Artificial Sequence: Synthetic oligonucleotide
cctgaagattttgcagtgtattactgtswmcagbhcggaagtagtmtcacttttggcggagggaccaag

SEQ ID NO: 767 - DNA, 69 bp, Artificial Sequence
  Description of Artificial Sequence: Synthetic oligonucleotide
cctgaagattttgcagtgtattactgtswmcagtacbhcagtagtmtcacttttggcggagggaccaag

SEQ ID NO: 768 - DNA, 69 bp, Artificial Sequence
  Description of Artificial Sequence: Synthetic oligonucleotide
  modified_base (41)..(41): a, c, t or g
cctgaagattttgcagtgtattactgtswmcagtacggavncagtmtcacttttggcggagggaccaag

SEQ ID NO: 769 - DNA, 69 bp, Artificial Sequence
  Description of Artificial Sequence: Synthetic oligonucleotide
cctgaagattttgcagtgtattactgtswmcagtacggaagtbhcmtcacttttggcggagggaccaag

SEQ ID NO: 770 - DNA, 69 bp, Artificial Sequence
  Description of Artificial Sequence: Synthetic oligonucleotide
cctgaagattttgcagtgtattactgtcagswmbhcggaagtagtmtcacttttggcggagggaccaag

SEQ ID NO: 771 - DNA, 69 bp, Artificial Sequence
  Description of Artificial Sequence: Synthetic oligonucleotide
cctgaagattttgcagtgtattactgtcagswmtacbhcagtagtmtcacttttggcggagggaccaag

SEQ ID NO: 772 - DNA, 69 bp, Artificial Sequence
  Description of Artificial Sequence: Synthetic oligonucleotide
  modified_base (41)..(41): a, c, t or g
cctgaagattttgcagtgtattactgtcagswmtacggavncagtmtcacttttggcggagggaccaag

SEQ ID NO: 773 - DNA, 69 bp, Artificial Sequence
  Description of Artificial Sequence: Synthetic oligonucleotide
cctgaagattttgcagtgtattactgtcagswmtacggaagtbhcmtcacttttggcggagggaccaag

SEQ ID NO: 774 - DNA, 69 bp, Artificial Sequence
  Description of Artificial Sequence: Synthetic oligonucleotide
cctgaagattttgcagtgtattactgtswmswmtacggaagtagtwggacttttggcggagggaccaag

SEQ ID NO: 775 - DNA, 69 bp, Artificial Sequence
  Description of Artificial Sequence: Synthetic oligonucleotide
cctgaagattttgcagtgtattactgtcagcagbhcbhcagtagtwggacttttggcggagggaccaag

SEQ ID NO: 776 - DNA, 69 bp, Artificial Sequence
  Description of Artificial Sequence: Synthetic oligonucleotide
  modified_base (41)..(41): a, c, t or g
cctgaagattttgcagtgtattactgtcagcagbhcggavncagtwggacttttggcggagggaccaag

SEQ ID NO: 777 - DNA, 69 bp, Artificial Sequence
  Description of Artificial Sequence: Synthetic oligonucleotide
cctgaagattttgcagtgtattactgtcagcagbhcggaagtbhcwggacttttggcggagggaccaag

SEQ ID NO: 778 - DNA, 69 bp, Artificial Sequence
  Description of Artificial Sequence: Synthetic oligonucleotide
  modified_base (41)..(41): a, c, t or g
cctgaagattttgcagtgtattactgtcagcagtacbhcvncagtwggacttttggcggagggaccaag

SEQ ID NO: 779 - DNA, 69 bp, Artificial Sequence
  Description of Artificial Sequence: Synthetic oligonucleotide
cctgaagattttgcagtgtattactgtcagcagtacbhcagtbhcwggacttttggcggagggaccaag

SEQ ID NO: 780 - DNA, 69 bp, Artificial Sequence
  Description of Artificial Sequence: Synthetic oligonucleotide
  modified_base (41)..(41): a, c, t or g
cctgaagattttgcagtgtattactgtcagcagtacggavncbhcwggacttttggcggagggaccaag

SEQ ID NO: 781 - DNA, 69 bp, Artificial Sequence
  Description of Artificial Sequence: Synthetic oligonucleotide
cctgaagattttgcagtgtattactgtswmcagbhcggaagtagtwggacttttggcggagggaccaag

SEQ ID NO: 782 - DNA, 69 bp, Artificial Sequence
  Description of Artificial Sequence: Synthetic oligonucleotide
cctgaagattttgcagtgtattactgtswmcagtacbhcagtagtwggacttttggcggagggaccaag

SEQ ID NO: 783 - DNA, 69 bp, Artificial Sequence
  Description of Artificial Sequence: Synthetic oligonucleotide
  modified_base (41)..(41): a, c, t or g
cctgaagattttgcagtgtattactgtswmcagtacggavncagtwggacttttggcggagggaccaag

SEQ ID NO: 784 - DNA, 69 bp, Artificial Sequence
  Description of Artificial Sequence: Synthetic oligonucleotide
cctgaagattttgcagtgtattactgtswmcagtacggaagtbhcwggacttttggcggagggaccaag

SEQ ID NO: 785 - DNA, 69 bp, Artificial Sequence
  Description of Artificial Sequence: Synthetic oligonucleotide
cctgaagattttgcagtgtattactgtcagswmbhcggaagtagtwggacttttggcggagggaccaag

SEQ ID NO: 786 - DNA, 69 bp, Artificial Sequence
  Description of Artificial Sequence: Synthetic oligonucleotide
cctgaagattttgcagtgtattactgtcagswmtacbhcagtagtwggacttttggcggagggaccaag

SEQ ID NO: 787 - DNA, 69 bp, Artificial Sequence
  Description of Artificial Sequence: Synthetic oligonucleotide
  modified_base (41)..(41): a, c, t or g
cctgaagattttgcagtgtattactgtcagswmtacggavncagtwggacttttggcggagggaccaag

SEQ ID NO: 788 - DNA, 69 bp, Artificial Sequence
  Description of Artificial Sequence: Synthetic oligonucleotide
cctgaagattttgcagtgtattactgtcagswmtacggaagtbhcwggacttttggcggagggaccaag

SEQ ID NO: 789 - DNA, 69 bp, Artificial Sequence
  Description of Artificial Sequence: Synthetic oligonucleotide
cctgaagattttgcagtgtattactgtswmswmtacggaagtagtcctacttttggcggagggaccaag

SEQ ID NO: 790 - DNA, 69 bp, Artificial Sequence
  Description of Artificial Sequence: Synthetic oligonucleotide
cctgaagattttgcagtgtattactgtcagcagbhcbhcagtagtcctacttttggcggagggaccaag

SEQ ID NO: 791 - DNA, 69 bp, Artificial Sequence
  Description of Artificial Sequence: Synthetic oligonucleotide
  modified_base (41)..(41): a, c, t or g
cctgaagattttgcagtgtattactgtcagcagbhcggavncagtcctacttttggcggagggaccaag

SEQ ID NO: 792 - DNA, 69 bp, Artificial Sequence
  Description of Artificial Sequence: Synthetic oligonucleotide
cctgaagattttgcagtgtattactgtcagcagbhcggaagtbhccctacttttggcggagggaccaag

SEQ ID NO: 793 - DNA, 69 bp, Artificial Sequence
  Description of Artificial Sequence: Synthetic oligonucleotide
  modified_base (41)..(41): a, c, t or g
cctgaagattttgcagtgtattactgtcagcagtacbhcvncagtcctacttttggcggagggaccaag

SEQ ID NO: 794 - DNA, 69 bp, Artificial Sequence
  Description of Artificial Sequence: Synthetic oligonucleotide
cctgaagattttgcagtgtattactgtcagcagtacbhcagtbhccctacttttggcggagggaccaag

SEQ ID NO: 795 - DNA, 69 bp, Artificial Sequence
  Description of Artificial Sequence: Synthetic oligonucleotide
  modified_base (41)..(41): a, c, t or g
cctgaagattttgcagtgtattactgtcagcagtacggavncbhccctacttttggcggagggaccaag

SEQ ID NO: 796 - DNA, 69 bp, Artificial Sequence
  Description of Artificial Sequence: Synthetic oligonucleotide
cctgaagattttgcagtgtattactgtswmcagbhcggaagtagtcctacttttggcggagggaccaag

SEQ ID NO: 797 - DNA, 69 bp, Artificial Sequence
  Description of Artificial Sequence: Synthetic oligonucleotide
cctgaagattttgcagtgtattactgtswmcagtacbhcagtagtcctacttttggcggagggaccaag

SEQ ID NO: 798 - DNA, 69 bp, Artificial Sequence
  Description of Artificial Sequence: Synthetic oligonucleotide
  modified_base (41)..(41): a, c, t or g
cctgaagattttgcagtgtattactgtswmcagtacggavncagtcctacttttggcggagggaccaag

SEQ ID NO: 799 - DNA, 69 bp, Artificial Sequence
  Description of Artificial Sequence: Synthetic oligonucleotide
cctgaagattttgcagtgtattactgtswmcagtacggaagtbhccctacttttggcggagggaccaag

SEQ ID NO: 800 - DNA, 69 bp, Artificial Sequence
  Description of Artificial Sequence: Synthetic oligonucleotide
cctgaagattttgcagtgtattactgtcagswmbhcggaagtagtcctacttttggcggagggaccaag

SEQ ID NO: 801 - DNA, 69 bp, Artificial Sequence
  Description of Artificial Sequence: Synthetic oligonucleotide
cctgaagattttgcagtgtattactgtcagswmtacbhcagtagtcctacttttggcggagggaccaag

SEQ ID NO: 802 - DNA, 69 bp, Artificial Sequence
  Description of Artificial Sequence: Synthetic oligonucleotide
  modified_base (41)..(41): a, c, t or g
cctgaagattttgcagtgtattactgtcagswmtacggavncagtcctacttttggcggagggaccaag

SEQ ID NO: 803 - DNA, 69 bp, Artificial Sequence
  Description of Artificial Sequence: Synthetic oligonucleotide
cctgaagattttgcagtgtattactgtcagswmtacggaagtbhccctacttttggcggagggaccaag

SEQ ID NO: 804 - DNA, 69 bp, Artificial Sequence
  Description of Artificial Sequence: Synthetic oligonucleotide
cctgatgattttgcaacttattactgccagcagbhcvrmmbctactwcacttttggcggagggaccaag

SEQ ID NO: 805 - DNA, 69 bp, Artificial Sequence
  Description of Artificial Sequence: Synthetic oligonucleotide
cctgatgattttgcaacttattactgccagcagbhcvrmmbctacmtcacttttggcggagggaccaag

SEQ ID NO: 806 - DNA, 69 bp, Artificial Sequence
  Description of Artificial Sequence: Synthetic oligonucleotide
cctgatgattttgcaacttattactgccagcagbhcvrmmbctacwggacttttggcggagggaccaag

SEQ ID NO: 807 - DNA, 69 bp, Artificial Sequence
  Description of Artificial Sequence: Synthetic oligonucleotide
cctgatgattttgcaacttattactgccagcagbhcvrmmbctacyctacttttggcggagggaccaag

SEQ ID NO: 808 - DNA, 69 bp, Artificial Sequence
  Description of Artificial Sequence: Synthetic oligonucleotide
cctgatgattttgcaacttattactgccagcagbhcaatmbcywctwcacttttggcggagggaccaag

SEQ ID NO: 809 - DNA, 69 bp, Artificial Sequence
  Description of Artificial Sequence: Synthetic oligonucleotide
cctgatgattttgcaacttattactgccagcagbhcaatmbcywcmtcacttttggcggagggaccaag

SEQ ID NO: 810 - DNA, 69 bp, Artificial Sequence
  Description of Artificial Sequence: Synthetic oligonucleotide
cctgatgattttgcaacttattactgccagcagbhcaatmbcywcwggacttttggcggagggaccaag

SEQ ID NO: 811 - DNA, 69 bp, Artificial Sequence
  Description of Artificial Sequence: Synthetic oligonucleotide
cctgatgattttgcaacttattactgccagcagbhcaatmbcywcyctacttttggcggagggaccaag

SEQ ID NO: 812 - DNA, 69 bp, Artificial Sequence
  Description of Artificial Sequence: Synthetic oligonucleotide
cctgatgattttgcaacttattactgccagcagbhcvrmagtywctwcacttttggcggagggaccaag

SEQ ID NO: 813 - DNA, 69 bp, Artificial Sequence
  Description of Artificial Sequence: Synthetic oligonucleotide
cctgatgattttgcaacttattactgccagcagbhcvrmagtywcmtcacttttggcggagggaccaag

SEQ ID NO: 814 - DNA, 69 bp, Artificial Sequence
  Description of Artificial Sequence: Synthetic oligonucleotide
cctgatgattttgcaacttattactgccagcagbhcvrmagtywcwggacttttggcggagggaccaag

SEQ ID NO: 815 - DNA, 69 bp, Artificial Sequence
  Description of Artificial Sequence: Synthetic oligonucleotide
cctgatgattttgcaacttattactgccagcagbhcvrmagtywcyctacttttggcggagggaccaag

SEQ ID NO: 816 - DNA, 69 bp, Artificial Sequence
  Description of Artificial Sequence: Synthetic oligonucleotide
cctgatgattttgcaacttattactgccagcagtacvrmmbcywctwcacttttggcggagggaccaag

SEQ ID NO: 817 - DNA, 69 bp, Artificial Sequence
  Description of Artificial Sequence: Synthetic oligonucleotide
cctgatgattttgcaacttattactgccagcagtacvrmmbcywcmtcacttttggcggagggaccaag

SEQ ID NO: 818 - DNA, 69 bp, Artificial Sequence
  Description of Artificial Sequence: Synthetic oligonucleotide
cctgatgattttgcaacttattactgccagcagtacvrmmbcywcwggacttttggcggagggaccaag

SEQ ID NO: 819 - DNA, 69 bp, Artificial Sequence
  Description of Artificial Sequence: Synthetic oligonucleotide
cctgatgattttgcaacttattactgccagcagtacvrmmbcywcyctacttttggcggagggaccaag

SEQ ID NO: 820 - DNA, 69 bp, Artificial Sequence
  Description of Artificial Sequence: Synthetic oligonucleotide
  modified_base (35)..(35): a, c, t or g
  modified_base (37)..(37): a, c, t or g
  modified_base (40)..(40): a, c, t or g
cctgaagattttgcaacttattactgtcagcagrnanhcnhcttctwcacttttggcggagggaccaag

SEQ ID NO: 821 - DNA, 69 bp, Artificial Sequence
  Description of Artificial Sequence: Synthetic oligonucleotide
  modified_base (35)..(35): a, c, t or g
  modified_base (37)..(37): a, c, t or g
  modified_base (40)..(40): a, c, t or g
cctgaagattttgcaacttattactgtcagcagrnanhcnhcttcmtcacttttggcggagggaccaag

SEQ ID NO: 822 - DNA, 69 bp, Artificial Sequence
  Description of Artificial Sequence: Synthetic oligonucleotide
  modified_base (35)..(35): a, c, t or g
  modified_base (37)..(37): a, c, t or g
  modified_base (40)..(40): a, c, t or g
cctgaagattttgcaacttattactgtcagcagrnanhcnhcttcwggacttttggcggagggaccaag

SEQ ID NO: 823 - DNA, 69 bp, Artificial Sequence
  Description of Artificial Sequence: Synthetic oligonucleotide
  modified_base (35)..(35): a, c, t or g
  modified_base (37)..(37): a, c, t or g
  modified_base (40)..(40): a, c, t or g
cctgaagattttgcaacttattactgtcagcagrnanhcnhcttccctacttttggcggagggaccaag

SEQ ID NO: 824 - DNA, 69 bp, Artificial Sequence
  Description of Artificial Sequence: Synthetic oligonucleotide
  modified_base (35)..(35): a, c, t or g
  modified_base (37)..(37): a, c, t or g
cctgaagattttgcaacttattactgtcagcagrnanhcagtywctwcacttttggcggagggaccaag

SEQ ID NO: 825 - DNA, 69 bp, Artificial Sequence
  Description of Artificial Sequence: Synthetic oligonucleotide
  modified_base (35)..(35): a, c, t or g
  modified_base (37)..(37): a, c, t or g
cctgaagattttgcaacttattactgtcagcagrnanhcagtywcmtcacttttggcggagggaccaag

SEQ ID NO: 826 - DNA, 69 bp, Artificial Sequence
  Description of Artificial Sequence: Synthetic oligonucleotide
  modified_base (35)..(35): a, c, t or g
  modified_base (37)..(37): a, c, t or g
cctgaagattttgcaacttattactgtcagcagrnanhcagtywcwggacttttggcggagggaccaag

SEQ ID NO: 827 - DNA, 69 bp, Artificial Sequence
  Description of Artificial Sequence: Synthetic oligonucleotide
  modified_base (35)..(35): a, c, t or g
  modified_base (37)..(37): a, c, t or g
cctgaagattttgcaacttattactgtcagcagrnanhcagtywccctacttttggcggagggaccaag

SEQ ID NO: 828 - DNA, 69 bp, Artificial Sequence
  Description of Artificial Sequence: Synthetic oligonucleotide
  modified_base (35)..(35): a, c, t or g
  modified_base (40)..(40): a, c, t or g
cctgaagattttgcaacttattactgtcagcagrnaaatnhcywctwcacttttggcggagggaccaag

SEQ ID NO: 829 - DNA, 69 bp, Artificial Sequence
  Description of Artificial Sequence: Synthetic oligonucleotide
  modified_base (35)..(35): a, c, t or g
  modified_base (40)..(40): a, c, t or g
cctgaagattttgcaacttattactgtcagcagrnaaatnhcywcmtcacttttggcggagggaccaag

SEQ ID NO: 830 - DNA, 69 bp, Artificial Sequence
  Description of Artificial Sequence: Synthetic oligonucleotide
  modified_base (35)..(35): a, c, t or g
  modified_base (40)..(40): a, c, t or g
cctgaagattttgcaacttattactgtcagcagrnaaatnhcywcwggacttttggcggagggaccaag

SEQ ID NO: 831 - DNA, 69 bp, Artificial Sequence
  Description of Artificial Sequence: Synthetic oligonucleotide
  modified_base (35)..(35): a, c, t or g
  modified_base (40)..(40): a, c, t or g
cctgaagattttgcaacttattactgtcagcagrnaaatnhcywccctacttttggcggagggaccaag

SEQ ID NO: 832 - DNA, 69 bp, Artificial Sequence
  Description of Artificial Sequence: Synthetic oligonucleotide
  modified_base (37)..(37): a, c, t or g
  modified_base (40)..(40): a, c, t or g
cctgaagattttgcaacttattactgtcagcaggcanhcnhcywctwcacttttggcggagggaccaag

SEQ ID NO: 833 - DNA, 69 bp, Artificial Sequence
  Description of Artificial Sequence: Synthetic oligonucleotide
  modified_base (37)..(37): a, c, t or g
  modified_base (40)..(40): a, c, t or g
cctgaagattttgcaacttattactgtcagcaggcanhcnhcywcmtcacttttggcggagggaccaag

SEQ ID NO: 834 - DNA, 69 bp, Artificial Sequence
  Description of Artificial Sequence: Synthetic oligonucleotide
  modified_base (37)..(37): a, c, t or g
  modified_base (40)..(40): a, c, t or g
cctgaagattttgcaacttattactgtcagcaggcanhcnhcywcwggacttttggcggagggaccaag

SEQ ID NO: 835 - DNA, 69 bp, Artificial Sequence
  Description of Artificial Sequence: Synthetic oligonucleotide
  modified_base (37)..(37): a, c, t or g
  modified_base (40)..(40): a, c, t or g
cctgaagattttgcaacttattactgtcagcaggcanhcnhcywccctacttttggcggagggaccaag

SEQ ID NO: 836 - DNA, 69 bp, Artificial Sequence
  Description of Artificial Sequence: Synthetic oligonucleotide
  modified_base (37)..(37): a, c, t or g
  modified_base (40)..(40): a, c, t or g
cctgaagatattgcaacatattactgtcagcagbhcnhcnhcctctwcacttttggcggagggaccaag

SEQ ID NO: 837 - DNA, 69 bp, Artificial Sequence
  Description of Artificial Sequence: Synthetic oligonucleotide
  modified_base (37)..(37): a, c, t or g
  modified_base (40)..(40): a, c, t or g
cctgaagatattgcaacatattactgtcagcagbhcnhcnhcctcmtcacttttggcggagggaccaag

SEQ ID NO: 838 - DNA, 69 bp, Artificial Sequence
  Description of Artificial Sequence: Synthetic oligonucleotide
  modified_base (37)..(37): a, c, t or g
  modified_base (40)..(40): a, c, t or g
cctgaagatattgcaacatattactgtcagcagbhcnhcnhcctcwggacttttggcggagggaccaag

SEQ ID NO: 839 - DNA, 69 bp, Artificial Sequence
  Description of Artificial Sequence: Synthetic oligonucleotide
  modified_base (37)..(37): a, c, t or g
  modified_base (40)..(40): a, c, t or g
cctgaagatattgcaacatattactgtcagcagbhcnhcnhcctccctacttttggcggagggaccaag

SEQ ID NO: 840 - DNA, 69 bp, Artificial Sequence
  Description of Artificial Sequence: Synthetic oligonucleotide
  modified_base (37)..(37): a, c, t or g
cctgaagatattgcaacatattactgtcagcagbhcnhcaatywctwcacttttggcggagggaccaag

SEQ ID NO: 841 - DNA, 69 bp, Artificial Sequence
  Description of Artificial Sequence: Synthetic oligonucleotide
  modified_base (37)..(37): a, c, t or g
cctgaagatattgcaacatattactgtcagcagbhcnhcaatywcmtcacttttggcggagggaccaag

SEQ ID NO: 842 - DNA, 69 bp, Artificial Sequence
  Description of Artificial Sequence: Synthetic oligonucleotide
  modified_base (37)..(37): a, c, t or g
cctgaagatattgcaacatattactgtcagcagbhcnhcaatywcwggacttttggcggagggaccaag

SEQ ID NO: 843 - DNA, 69 bp, Artificial Sequence
  Description of Artificial Sequence: Synthetic oligonucleotide
  modified_base (37)..(37): a, c, t or g
cctgaagatattgcaacatattactgtcagcagbhcnhcaatywccctacttttggcggagggaccaag

SEQ ID NO: 844 - DNA, 69 bp, Artificial Sequence
  Description of Artificial Sequence: Synthetic oligonucleotide
  modified_base (40)..(40): a, c, t or g
cctgaagatattgcaacatattactgtcagcagbhcgatnhcywctwcacttttggcggagggaccaag

SEQ ID NO: 845 - DNA, 69 bp, Artificial Sequence
  Description of Artificial Sequence: Synthetic oligonucleotide
  modified_base (40)..(40): a, c, t or g
cctgaagatattgcaacatattactgtcagcagbhcgatnhcywcmtcacttttggcggagggaccaag

SEQ ID NO: 846 - DNA, 69 bp, Artificial Sequence
  Description of Artificial Sequence: Synthetic oligonucleotide
  modified_base (40)..(40): a, c, t or g
cctgaagatattgcaacatattactgtcagcagbhcgatnhcywcwggacttttggcggagggaccaag

SEQ ID NO: 847 - DNA, 69 bp, Artificial Sequence
  Description of Artificial Sequence: Synthetic oligonucleotide
  modified_base (40)..(40): a, c, t or g
cctgaagatattgcaacatattactgtcagcagbhcgatnhcywccctacttttggcggagggaccaag

SEQ ID NO: 848 - DNA, 69 bp, Artificial Sequence
  Description of Artificial Sequence: Synthetic oligonucleotide
  modified_base (37)..(37): a, c, t or g
  modified_base (40)..(40): a, c, t or g
cctgaagatattgcaacatattactgtcagcagtacnhcnhcywctwcacttttggcggagggaccaag

SEQ ID NO: 849 - DNA, 69 bp, Artificial Sequence
  Description of Artificial Sequence: Synthetic oligonucleotide
  modified_base (37)..(37): a, c, t or g
  modified_base (40)..(40): a, c, t or g
cctgaagatattgcaacatattactgtcagcagtacnhcnhcywcmtcacttttggcggagggaccaag

SEQ ID NO: 850 - DNA, 69 bp, Artificial Sequence
  Description of Artificial Sequence: Synthetic oligonucleotide
  modified_base (37)..(37): a, c, t or g
  modified_base (40)..(40): a, c, t or g
cctgaagatattgcaacatattactgtcagcagtacnhcnhcywcwggacttttggcggagggaccaag

SEQ ID NO: 851 - DNA, 69 bp, Artificial Sequence
  Description of Artificial Sequence: Synthetic oligonucleotide
  modified_base (37)..(37): a, c, t or g
  modified_base (40)..(40): a, c, t or g
cctgaagatattgcaacatattactgtcagcagtacnhcnhcywccctacttttggcggagggaccaag

SEQ ID NO: 852 - DNA, 69 bp, Artificial Sequence
  Description of Artificial Sequence: Synthetic oligonucleotide
  modified_base (35)..(35): a, c, t or g
  modified_base (40)..(40): a, c, t or g
cctgaagattttgcaacttactactgtcagcaavnabhcnhcacttwcacttttggcggagggaccaag

SEQ ID NO: 853 - DNA, 69 bp, Artificial Sequence
  Description of Artificial Sequence: Synthetic oligonucleotide
  modified_base (35)..(35): a, c, t or g
  modified_base (40)..(40): a, c, t or g
cctgaagattttgcaacttactactgtcagcaavnabhcnhcactmtcacttttggcggagggaccaag

SEQ ID NO: 854 - DNA, 69 bp, Artificial Sequence
  Description of Artificial Sequence: Synthetic oligonucleotide
  modified_base (35)..(35): a, c, t or g
  modified_base (40)..(40): a, c, t or g
cctgaagattttgcaacttactactgtcagcaavnabhcnhcactwggacttttggcggagggaccaag

SEQ ID NO: 855 - DNA, 69 bp, Artificial Sequence
  Description of Artificial Sequence: Synthetic oligonucleotide
  modified_base (35)..(35): a, c, t or g
  modified_base (40)..(40): a, c, t or g
cctgaagattttgcaacttactactgtcagcaavnabhcnhcactcctacttttggcggagggaccaag

SEQ ID NO: 856 - DNA, 69 bp, Artificial Sequence
  Description of Artificial Sequence: Synthetic oligonucleotide
  modified_base (35)..(35): a, c, t or g
cctgaagattttgcaacttactactgtcagcaavnabhcagtbhctwcacttttggcggagggaccaag

SEQ ID NO: 857 - DNA, 69 bp, Artificial Sequence
  Description of Artificial Sequence: Synthetic oligonucleotide
  modified_base (35)..(35): a, c, t or g
cctgaagattttgcaacttactactgtcagcaavnabhcagtbhcmtcacttttggcggagggaccaag

SEQ ID NO: 858 - DNA, 69 bp, Artificial Sequence
  Description of Artificial Sequence: Synthetic oligonucleotide
  modified_base (35)..(35): a, c, t or g
cctgaagattttgcaacttactactgtcagcaavnabhcagtbhcwggacttttggcggagggaccaag

SEQ ID NO: 859 - DNA, 69 bp, Artificial Sequence
  Description of Artificial Sequence: Synthetic oligonucleotide
  modified_base (35)..(35): a, c, t or g
cctgaagattttgcaacttactactgtcagcaavnabhcagtbhccctacttttggcggagggaccaag

SEQ ID NO: 860 - DNA, 69 bp, Artificial Sequence
  Description of Artificial Sequence: Synthetic oligonucleotide
  modified_base (35)..(35): a, c, t or g
  modified_base (40)..(40): a, c, t or g
cctgaagattttgcaacttactactgtcagcaavnatacnhcbhctwcacttttggcggagggaccaag

SEQ ID NO: 861 - DNA, 69 bp, Artificial Sequence
  Description of Artificial Sequence: Synthetic oligonucleotide
  modified_base (35)..(35): a, c, t or g
  modified_base (40)..(40): a, c, t or g
cctgaagattttgcaacttactactgtcagcaavnatacnhcbhcmtcacttttggcggagggaccaag

SEQ ID NO: 862 - DNA, 69 bp, Artificial Sequence
  Description of Artificial Sequence: Synthetic oligonucleotide
  modified_base (35)..(35): a, c, t or g
  modified_base (40)..(40): a, c, t or g
cctgaagattttgcaacttactactgtcagcaavnatacnhcbhcwggacttttggcggagggaccaag

SEQ ID NO: 863 - DNA, 69 bp, Artificial Sequence
  Description of Artificial Sequence: Synthetic oligonucleotide
  modified_base (35)..(35): a, c, t or g
  modified_base (40)..(40): a, c, t or g
cctgaagattttgcaacttactactgtcagcaavnatacnhcbhccctacttttggcggagggaccaag

SEQ ID NO: 864 - DNA, 69 bp, Artificial Sequence
  Description of Artificial Sequence: Synthetic oligonucleotide
  modified_base (40)..(40): a, c, t or g
cctgaagattttgcaacttactactgtcagcaaagcbhcnhcbhctwcacttttggcggagggaccaag

SEQ ID NO: 865 - DNA, 69 bp, Artificial Sequence
  Description of Artificial Sequence: Synthetic oligonucleotide
  modified_base (40)..(40): a, c, t or g
cctgaagattttgcaacttactactgtcagcaaagcbhcnhcbhcmtcacttttggcggagggaccaag

SEQ ID NO: 866 - DNA, 69 bp, Artificial Sequence
  Description of Artificial Sequence: Synthetic oligonucleotide
  modified_base (40)..(40): a, c, t or g
cctgaagattttgcaacttactactgtcagcaaagcbhcnhcbhcwggacttttggcggagggaccaag

SEQ ID NO: 867 - DNA, 69 bp, Artificial Sequence
  Description of Artificial Sequence: Synthetic oligonucleotide
  modified_base (40)..(40): a, c, t or g
cctgaagattttgcaacttactactgtcagcaaagcbhcnhcbhccctacttttggcggagggaccaag

SEQ ID NO: 868 - DNA, 69 bp, Artificial Sequence
  Description of Artificial Sequence: Synthetic oligonucleotide
  modified_base (35)..(35): a, c, t or g
  modified_base (38)..(38): a, c, t or g
gctgaggatgttggggtttattactgcatgcagvnamnasrmacttwcacttttggcggagggaccaag

SEQ ID NO: 869 - DNA, 69 bp, Artificial Sequence
  Description of Artificial Sequence: Synthetic oligonucleotide
  modified_base (35)..(35): a, c, t or g
  modified_base (38)..(38): a, c, t or g
gctgaggatgttggggtttattactgcatgcagvnamnasrmactmtcacttttggcggagggaccaag

SEQ ID NO: 870 - DNA, 69 bp, Artificial Sequence
  Description of Artificial Sequence: Synthetic oligonucleotide
  modified_base (35)..(35): a, c, t or g
  modified_base (38)..(38): a, c, t or g
gctgaggatgttggggtttattactgcatgcagvnamnasrmactwggacttttggcggagggaccaag

SEQ ID NO: 871 - DNA, 69 bp, Artificial Sequence
  Description of Artificial Sequence: Synthetic oligonucleotide
  modified_base (35)..(35): a, c, t or g
  modified_base (38)..(38): a, c, t or g
gctgaggatgttggggtttattactgcatgcagvnamnasrmactcctacttttggcggagggaccaag

SEQ ID NO: 872 - DNA, 69 bp, Artificial Sequence
  Description of Artificial Sequence: Synthetic oligonucleotide
  modified_base (35)..(35): a, c, t or g
  modified_base (38)..(38): a, c, t or g
gctgaggatgttggggtttattactgcatgcagvnamnacagvbctwcacttttggcggagggaccaag

SEQ ID NO: 873 - DNA, 69 bp, Artificial Sequence
  Description of Artificial Sequence: Synthetic oligonucleotide
  modified_base (35)..(35): a, c, t or g
  modified_base (38)..(38): a, c, t or g
gctgaggatgttggggtttattactgcatgcagvnamnacagvbcmtcacttttggcggagggaccaag

SEQ ID NO: 874 - DNA, 69 bp, Artificial Sequence
  Description of Artificial Sequence: Synthetic oligonucleotide
  modified_base (35)..(35): a, c, t or g
  modified_base (38)..(38): a, c, t or g
gctgaggatgttggggtttattactgcatgcagvnamnacagvbcwggacttttggcggagggaccaag

SEQ ID NO: 875 - DNA, 69 bp, Artificial Sequence
  Description of Artificial Sequence: Synthetic oligonucleotide
  modified_base (35)..(35): a, c, t or g
  modified_base (38)..(38): a, c, t or g
gctgaggatgttggggtttattactgcatgcagvnamnacagvbccctacttttggcggagggaccaag

SEQ ID NO: 876 - DNA, 69 bp, Artificial Sequence
  Description of Artificial Sequence: Synthetic oligonucleotide
  modified_base (35)..(35): a, c, t or g
gctgaggatgttggggtttattactgcatgcagvnactcsrmvbctwcacttttggcggagggaccaag

SEQ ID NO: 877 - DNA, 69 bp, Artificial Sequence
  Description of Artificial Sequence: Synthetic oligonucleotide
  modified_base (35)..(35): a, c, t or g
gctgaggatgttggggtttattactgcatgcagvnactcsrmvbcmtcacttttggcggagggaccaag

SEQ ID NO: 878 - DNA, 69 bp, Artificial Sequence
  Description of Artificial Sequence: Synthetic oligonucleotide
  modified_base (35)..(35): a, c, t or g
gctgaggatgttggggtttattactgcatgcagvnactcsrmvbcwggacttttggcggagggaccaag

SEQ ID NO: 879 - DNA, 69 bp, Artificial Sequence
  Description of Artificial Sequence: Synthetic oligonucleotide
  modified_base (35)..(35): a, c, t or g
gctgaggatgttggggtttattactgcatgcagvnactcsrmvbccctacttttggcggagggaccaag

SEQ ID NO: 880 - DNA, 69 bp, Artificial Sequence
  Description of Artificial Sequence: Synthetic oligonucleotide
  modified_base (38)..(38): a, c, t or g
gctgaggatgttggggtttattactgcatgcaggcamnasrmvbctwcacttttggcggagggaccaag

SEQ ID NO: 881 - DNA, 69 bp, Artificial Sequence
  Description of Artificial Sequence: Synthetic oligonucleotide
  modified_base (38)..(38): a, c, t or g
gctgaggatgttggggtttattactgcatgcaggcamnasrmvbcmtcacttttggcggagggaccaag

SEQ ID NO: 882 - DNA, 69 bp, Artificial Sequence
  Description of Artificial Sequence: Synthetic oligonucleotide
  modified_base (38)..(38): a, c, t or g
gctgaggatgttggggtttattactgcatgcaggcamnasrmvbcwggacttttggcggagggaccaag

SEQ ID NO: 883 - DNA, 69 bp, Artificial Sequence
  Description of Artificial Sequence: Synthetic oligonucleotide
  modified_base (38)..(38): a, c, t or g
gctgaggatgttggggtttattactgcatgcaggcamnasrmvbccctacttttggcggagggaccaag

SEQ ID NO: 884 - DNA, 69 bp, Artificial Sequence
  Description of Artificial Sequence: Synthetic oligonucleotide
  modified_base (37)..(37): a, c, t or g
  modified_base (40)..(40): a, c, t or g
cctgaagattttgcagtttattactgtcagcagbhcnhcnhctggtwcacttttggcggagggaccaag

SEQ ID NO: 885 - DNA, 69 bp, Artificial Sequence
  Description of Artificial Sequence: Synthetic oligonucleotide
  modified_base (37)..(37): a, c, t or g
  modified_base (40)..(40): a, c, t or g
cctgaagattttgcagtttattactgtcagcagbhcnhcnhctggmtcacttttggcggagggaccaag

SEQ ID NO: 886 - DNA, 69 bp, Artificial Sequence
  Description of Artificial Sequence: Synthetic oligonucleotide
  modified_base (37)..(37): a, c, t or g
  modified_base (40)..(40): a, c, t or g
cctgaagattttgcagtttattactgtcagcagbhcnhcnhctggwggacttttggcggagggaccaag

SEQ ID NO: 887 - DNA, 69 bp, Artificial Sequence
  Description of Artificial Sequence: Synthetic oligonucleotide
  modified_base (37)..(37): a, c, t or g
  modified_base (40)..(40): a, c, t or g
cctgaagattttgcagtttattactgtcagcagbhcnhcnhctggcctacttttggcggagggaccaag

SEQ ID NO: 888 - DNA, 69 bp, Artificial Sequence
  Description of Artificial Sequence: Synthetic oligonucleotide
  modified_base (37)..(37): a, c, t or g
cctgaagattttgcagtttattactgtcagcagbhcnhcaatywctwcacttttggcggagggaccaag

SEQ ID NO: 889 - DNA, 69 bp, Artificial Sequence
  Description of Artificial Sequence: Synthetic oligonucleotide
  modified_base (37)..(37): a, c, t or g
cctgaagattttgcagtttattactgtcagcagbhcnhcaatywcmtcacttttggcggagggaccaag

SEQ ID NO: 890 - DNA, 69 bp, Artificial Sequence
  Description of Artificial Sequence: Synthetic oligonucleotide
  modified_base (37)..(37): a, c, t or g
cctgaagattttgcagtttattactgtcagcagbhcnhcaatywcwggacttttggcggagggaccaag

SEQ ID NO: 891 - DNA, 69 bp, Artificial Sequence
  Description of Artificial Sequence: Synthetic oligonucleotide
  modified_base (37)..(37): a, c, t or g
cctgaagattttgcagtttattactgtcagcagbhcnhcaatywccctacttttggcggagggaccaag

SEQ ID NO: 892 - DNA, 69 bp, Artificial Sequence
  Description of Artificial Sequence: Synthetic oligonucleotide
  modified_base (40)..(40): a, c, t or g
cctgaagattttgcagtttattactgtcagcagbhcagtnhcywctwcacttttggcggagggaccaag

SEQ ID NO: 893 - DNA, 69 bp, Artificial Sequence
  Description of Artificial Sequence: Synthetic oligonucleotide
  modified_base (40)..(40): a, c, t or g
cctgaagattttgcagtttattactgtcagcagbhcagtnhcywcmtcacttttggcggagggaccaag

SEQ ID NO: 894 - DNA, 69 bp, Artificial Sequence
  Description of Artificial Sequence: Synthetic oligonucleotide
  modified_base (40)..(40): a, c, t or g
cctgaagattttgcagtttattactgtcagcagbhcagtnhcywcwggacttttggcggagggaccaag

SEQ ID NO: 895 - DNA, 69 bp, Artificial Sequence
  Description of Artificial Sequence: Synthetic oligonucleotide
  modified_base (40)..(40): a, c, t or g
cctgaagattttgcagtttattactgtcagcagbhcagtnhcywccctacttttggcggagggaccaag

SEQ ID NO: 896 - DNA, 69 bp, Artificial Sequence
  Description of Artificial Sequence: Synthetic oligonucleotide
  modified_base (37)..(37): a, c, t or g
  modified_base (40)..(40): a, c, t or g
cctgaagattttgcagtttattactgtcagcagaganhcnhcywctwcacttttggcggagggaccaag

SEQ ID NO: 897 - DNA, 69 bp, Artificial Sequence
  Description of Artificial Sequence: Synthetic oligonucleotide
  modified_base (37)..(37): a, c, t or g
  modified_base (40)..(40): a, c, t or g
cctgaagattttgcagtttattactgtcagcagaganhcnhcywcmtcacttttggcggagggaccaag

SEQ ID NO: 898 - DNA, 69 bp, Artificial Sequence
  Description of Artificial Sequence: Synthetic oligonucleotide
  modified_base (37)..(37): a, c, t or g
  modified_base (40)..(40): a, c, t or g
cctgaagattttgcagtttattactgtcagcagaganhcnhcywcwggacttttggcggagggaccaag

SEQ ID NO: 899 - DNA, 69 bp, Artificial Sequence
  Description of Artificial Sequence: Synthetic oligonucleotide
  modified_base (37)..(37): a, c, t or g
  modified_base (40)..(40): a, c, t or g
cctgaagattttgcagtttattactgtcagcagaganhcnhcywccctacttttggcggagggaccaag

SEQ ID NO: 900 - DNA, 72 bp, Artificial Sequence
  Description of Artificial Sequence: Synthetic oligonucleotide
  modified_base (40)..(40): a, c, t or g
  modified_base (43)..(43): a, c, t or g
cagtctgaagattttgcagtttattactgtcagcagbhcnhcnhctggtwcacttttggcggagggaccaag

SEQ ID NO: 901 - DNA, 72 bp, Artificial Sequence
  Description of Artificial Sequence: Synthetic oligonucleotide
  modified_base (40)..(40): a, c, t or g
  modified_base (43)..(43): a, c, t or g
cagtctgaagattttgcagtttattactgtcagcagbhcnhcnhctggmtcacttttggcggagggaccaag

SEQ ID NO: 902 - DNA, 72 bp, Artificial Sequence
  Description of Artificial Sequence: Synthetic oligonucleotide
  modified_base (40)..(40): a, c, t or g
  modified_base (43)..(43): a, c, t or g
cagtctgaagattttgcagtttattactgtcagcagbhcnhcnhctggwggacttttggcggagggaccaag

SEQ ID NO: 903 - DNA, 72 bp, Artificial Sequence
  Description of Artificial Sequence: Synthetic oligonucleotide
  modified_base (40)..(40): a, c, t or g
  modified_base (43)..(43): a, c, t or g
cagtctgaagattttgcagtttattactgtcagcagbhcnhcnhctggcctacttttggcggagggaccaag

SEQ ID NO: 904 - DNA, 72 bp, Artificial Sequence
  Description of Artificial Sequence: Synthetic oligonucleotide
  modified_base (40)..(40): a, c, t or g
cagtctgaagattttgcagtttattactgtcagcagbhcnhcaatywctwcacttttggcggagggaccaag

SEQ ID NO: 905 - DNA, 72 bp, Artificial Sequence
  Description of Artificial Sequence: Synthetic oligonucleotide
  modified_base (40)..(40): a, c, t or g
cagtctgaagattttgcagtttattactgtcagcagbhcnhcaatywcmtcacttttggcggagggaccaag

SEQ ID NO: 906 - DNA, 72 bp, Artificial Sequence
  Description of Artificial Sequence: Synthetic oligonucleotide
  modified_base (40)..(40): a, c, t or g
cagtctgaagattttgcagtttattactgtcagcagbhcnhcaatywcwggacttttggcggagggaccaag

SEQ ID NO: 907 - DNA, 72 bp, Artificial Sequence
  Description of Artificial Sequence: Synthetic oligonucleotide
  modified_base (40)..(40): a, c, t or g
cagtctgaagattttgcagtttattactgtcagcagbhcnhcaatywccctacttttggcggagggaccaag

SEQ ID NO: 908 - DNA, 72 bp, Artificial Sequence
  Description of Artificial Sequence: Synthetic oligonucleotide
  modified_base (43)..(43): a, c, t or g
cagtctgaagattttgcagtttattactgtcagcagbhcaatnhcywctwcacttttggcggagggaccaag

SEQ ID NO: 909 - DNA, 72 bp, Artificial Sequence
  Description of Artificial Sequence: Synthetic oligonucleotide
  modified_base (43)..(43): a, c, t or g
cagtctgaagattttgcagtttattactgtcagcagbhcaatnhcywcmtcacttttggcggagggaccaag

SEQ ID NO: 910 - DNA, 72 bp, Artificial Sequence
  Description of Artificial Sequence: Synthetic oligonucleotide
  modified_base (43)..(43): a, c, t or g
cagtctgaagattttgcagtttattactgtcagcagbhcaatnhcywcwggacttttggcggagggaccaag

SEQ ID NO: 911 - DNA, 72 bp, Artificial Sequence
  Description of Artificial Sequence: Synthetic oligonucleotide
  modified_base (43)..(43): a, c, t or g
cagtctgaagattttgcagtttattactgtcagcagbhcaatnhcywccctacttttggcggagggaccaag

SEQ ID NO: 912 - DNA, 72 bp, Artificial Sequence
  Description of Artificial Sequence: Synthetic oligonucleotide
  modified_base (40)..(40): a, c, t or g
  modified_base (43)..(43): a, c, t or g
cagtctgaagattttgcagtttattactgtcagcagtacnhcnhcywctwcacttttggcggagggaccaag

SEQ ID NO: 913 - DNA, 72 bp, Artificial Sequence
  Description of Artificial Sequence: Synthetic oligonucleotide
  modified_base (40)..(40): a, c, t or g
  modified_base (43)..(43): a, c, t or g
cagtctgaagattttgcagtttattactgtcagcagtacnhcnhcywcmtcacttttggcggagggaccaag

SEQ ID NO: 914 - DNA, 72 bp, Artificial Sequence
  Description of Artificial Sequence: Synthetic oligonucleotide
  modified_base (40)..(40): a, c, t or g
  modified_base (43)..(43): a, c, t or g
cagtctgaagattttgcagtttattactgtcagcagtacnhcnhcywcwggacttttggcggagggaccaag

SEQ ID NO: 915 - DNA, 72 bp, Artificial Sequence
  Description of Artificial Sequence: Synthetic oligonucleotide
  modified_base (40)..(40): a, c, t or g
  modified_base (43)..(43): a, c, t or g
cagtctgaagattttgcagtttattactgtcagcagtacnhcnhcywccctacttttggcggagggaccaag

SEQ ID NO: 916 - DNA, 69 bp, Artificial Sequence
  Description of Artificial Sequence: Synthetic oligonucleotide
  modified_base (41)..(41): a, c, t or g
cctgaagattttgcagtgtattactgtcagcagbhcbhcvncagttwcacttttggcggagggaccaag

SEQ ID NO: 917 - DNA, 69 bp, Artificial Sequence
  Description of Artificial Sequence: Synthetic oligonucleotide
  modified_base (41)..(41): a, c, t or g
cctgaagattttgcagtgtattactgtcagcagbhcbhcvncagtmtcacttttggcggagggaccaag

SEQ ID NO: 918 - DNA, 69 bp, Artificial Sequence
  Description of Artificial Sequence: Synthetic oligonucleotide
  modified_base (41)..(41): a, c, t or g
cctgaagattttgcagtgtattactgtcagcagbhcbhcvncagtwggacttttggcggagggaccaag

SEQ ID NO: 919 - DNA, 69 bp, Artificial Sequence
  Description of Artificial Sequence: Synthetic oligonucleotide
  modified_base (41)..(41): a, c, t or g
cctgaagattttgcagtgtattactgtcagcagbhcbhcvncagtcctacttttggcggagggaccaag

SEQ ID NO: 920 - DNA, 69 bp, Artificial Sequence
  Description of Artificial Sequence: Synthetic oligonucleotide
cctgaagattttgcagtgtattactgtcagcagbhcbhcagtbhctwcacttttggcggagggaccaag

SEQ ID NO: 921 - DNA, 69 bp, Artificial Sequence
  Description of Artificial Sequence: Synthetic oligonucleotide
cctgaagattttgcagtgtattactgtcagcagbhcbhcagtbhcmtcacttttggcggagggaccaag

SEQ ID NO: 922 - DNA, 69 bp, Artificial Sequence
  Description of Artificial Sequence: Synthetic oligonucleotide
cctgaagattttgcagtgtattactgtcagcagbhcbhcagtbhcwggacttttggcggagggaccaag

SEQ ID NO: 923 - DNA, 69 bp, Artificial Sequence
  Description of Artificial Sequence: Synthetic oligonucleotide
cctgaagattttgcagtgtattactgtcagcagbhcbhcagtbhccctacttttggcggagggaccaag

SEQ ID NO: 924 - DNA, 69 bp, Artificial Sequence
  Description of Artificial Sequence: Synthetic oligonucleotide
  modified_base (41)..(41): a, c, t or g
cctgaagattttgcagtgtattactgtcagcagbhcggavncbhctwcacttttggcggagggaccaag

SEQ ID NO: 925 - DNA, 69 bp, Artificial Sequence
  Description of Artificial Sequence: Synthetic oligonucleotide
  modified_base (41)..(41): a, c, t or g
cctgaagattttgcagtgtattactgtcagcagbhcggavncbhcmtcacttttggcggagggaccaag

SEQ ID NO: 926 - DNA, 69 bp, Artificial Sequence
  Description of Artificial Sequence: Synthetic oligonucleotide
  modified_base (41)..(41): a, c, t or g
cctgaagattttgcagtgtattactgtcagcagbhcggavncbhcwggacttttggcggagggaccaag

SEQ ID NO: 927 - DNA, 69 bp, Artificial Sequence
  Description of Artificial Sequence: Synthetic oligonucleotide
  modified_base (41)..(41): a, c, t or g
cctgaagattttgcagtgtattactgtcagcagbhcggavncbhccctacttttggcggagggaccaag

SEQ ID NO: 928 - DNA, 69 bp, Artificial Sequence
  Description of Artificial Sequence: Synthetic oligonucleotide
  modified_base (41)..(41): a, c, t or g
cctgaagattttgcagtgtattactgtcagcagtacbhcvncbhctwcacttttggcggagggaccaag

SEQ ID NO: 929 - DNA, 69 bp, Artificial Sequence
  Description of Artificial Sequence: Synthetic oligonucleotide
  modified_base (41)..(41): a, c, t or g
cctgaagattttgcagtgtattactgtcagcagtacbhcvncbhcmtcacttttggcggagggaccaag

SEQ ID NO: 930 - DNA, 69 bp, Artificial Sequence
  Description of Artificial Sequence: Synthetic oligonucleotide
  modified_base (41)..(41): a, c, t or g
cctgaagattttgcagtgtattactgtcagcagtacbhcvncbhcwggacttttggcggagggaccaag

SEQ ID NO: 931 - DNA, 69 bp, Artificial Sequence
  Description of Artificial Sequence: Synthetic oligonucleotide
  modified_base (41)..(41): a, c, t or g
cctgaagattttgcagtgtattactgtcagcagtacbhcvncbhccctacttttggcggagggaccaag

SEQ ID NO: 932 - DNA, 69 bp, Artificial Sequence
  Description of Artificial Sequence: Synthetic oligonucleotide
  modified_base (40)..(40): a, c, t or g
gctgaagatgtggcagtttattactgtcagcagbhcbhcnhcacttwcacttttggcggagggaccaag

SEQ ID NO: 933 - DNA, 69 bp, Artificial Sequence
  Description of Artificial Sequence: Synthetic oligonucleotide
  modified_base (40)..(40): a, c, t or g
gctgaagatgtggcagtttattactgtcagcagbhcbhcnhcactmtcacttttggcggagggaccaag

SEQ ID NO: 934 - DNA, 69 bp, Artificial Sequence
  Description of Artificial Sequence: Synthetic oligonucleotide
  modified_base (40)..(40): a, c, t or g
gctgaagatgtggcagtttattactgtcagcagbhcbhcnhcactwggacttttggcggagggaccaag

SEQ ID NO: 935 - DNA, 69 bp, Artificial Sequence
  Description of Artificial Sequence: Synthetic oligonucleotide
  modified_base (40)..(40): a, c, t or g
gctgaagatgtggcagtttattactgtcagcagbhcbhcnhcactcctacttttggcggagggaccaag

SEQ ID NO: 936 - DNA, 69 bp, Artificial Sequence
  Description of Artificial Sequence: Synthetic oligonucleotide
gctgaagatgtggcagtttattactgtcagcagbhcbhcagtbhctwcacttttggcggagggaccaag

SEQ ID NO: 937 - DNA, 69 bp, Artificial Sequence
  Description of Artificial Sequence: Synthetic oligonucleotide
gctgaagatgtggcagtttattactgtcagcagbhcbhcagtbhcmtcacttttggcggagggaccaag

SEQ ID NO: 938 - DNA, 69 bp, Artificial Sequence
  Description of Artificial Sequence: Synthetic oligonucleotide
gctgaagatgtggcagtttattactgtcagcagbhcbhcagtbhcwggacttttggcggagggaccaag

SEQ ID NO: 939 - DNA, 69 bp, Artificial Sequence
  Description of Artificial Sequence: Synthetic oligonucleotide
gctgaagatgtggcagtttattactgtcagcagbhcbhcagtbhccctacttttggcggagggaccaag

SEQ ID NO: 940 - DNA, 69 bp, Artificial Sequence
  Description of Artificial Sequence: Synthetic oligonucleotide
  modified_base (40)..(40): a, c, t or g
gctgaagatgtggcagtttattactgtcagcagbhctacnhcbhctwcacttttggcggagggaccaag

SEQ ID NO: 941 - DNA, 69 bp, Artificial Sequence
  Description of Artificial Sequence: Synthetic oligonucleotide
  modified_base (40)..(40): a, c, t or g
gctgaagatgtggcagtttattactgtcagcagbhctacnhcbhcmtcacttttggcggagggaccaag

SEQ ID NO: 942 - DNA, 69 bp, Artificial Sequence
  Description of Artificial Sequence: Synthetic oligonucleotide
  modified_base (40)..(40): a, c, t or g
gctgaagatgtggcagtttattactgtcagcagbhctacnhcbhcwggacttttggcggagggaccaag

SEQ ID NO: 943 - DNA, 69 bp, Artificial Sequence
  Description of Artificial Sequence: Synthetic oligonucleotide
  modified_base (40)..(40): a, c, t or g
gctgaagatgtggcagtttattactgtcagcagbhctacnhcbhccctacttttggcggagggaccaag

SEQ ID NO: 944 - DNA, 69 bp, Artificial Sequence
  Description of Artificial Sequence: Synthetic oligonucleotide
  modified_base (40)..(40): a, c, t or g
gctgaagatgtggcagtttattactgtcagcagtacbhcnhcbhctwcacttttggcggagggaccaag

SEQ ID NO: 945 - DNA, 69 bp, Artificial Sequence
  Description of Artificial Sequence: Synthetic oligonucleotide
  modified_base (40)..(40): a, c, t or g
gctgaagatgtggcagtttattactgtcagcagtacbhcnhcbhcmtcacttttggcggagggaccaag

SEQ ID NO: 946 - DNA, 69 bp, Artificial Sequence
  Description of Artificial Sequence: Synthetic oligonucleotide
  modified_base (40)..(40): a, c, t or g
gctgaagatgtggcagtttattactgtcagcagtacbhcnhcbhcwggacttttggcggagggaccaag

SEQ ID NO: 947 - DNA, 69 bp, Artificial Sequence
  Description of Artificial Sequence: Synthetic oligonucleotide
  modified_base (40)..(40): a, c, t or g
gctgaagatgtggcagtttattactgtcagcagtacbhcnhcbhccctacttttggcggagggaccaag

SEQ ID NO: 948 - DNA, 24 bp, Artificial Sequence
  Description of Artificial Sequence: Synthetic oligonucleotide
swmswmtacaatagttactwcact

SEQ ID NO: 949 - DNA, 24 bp, Artificial Sequence
  Description of Artificial Sequence: Synthetic oligonucleotide
cagcagbhcvrmagttactwcact

SEQ ID NO: 950 - DNA, 24 bp, Artificial Sequence
  Description of Artificial Sequence: Synthetic oligonucleotide
cagcagbhcaatmbctactwcact

SEQ ID NO: 951 - DNA, 24 bp, Artificial Sequence
  Description of Artificial Sequence: Synthetic oligonucleotide
cagcagbhcaatagtywctwcact

SEQ ID NO: 952 - DNA, 24 bp, Artificial Sequence
  Description of Artificial Sequence: Synthetic oligonucleotide
cagcagtacvrmmbctactwcact

SEQ ID NO: 953 - DNA, 24 bp, Artificial Sequence
  Description of Artificial Sequence: Synthetic oligonucleotide
cagcagtacvrmagtywctwcact

SEQ ID NO: 954 - DNA, 24 bp, Artificial Sequence
  Description of Artificial Sequence: Synthetic oligonucleotide
cagcagtacaatmbcywctwcact

SEQ ID NO: 955 - DNA, 24 bp, Artificial Sequence
  Description of Artificial Sequence: Synthetic oligonucleotide
swmcagbhcaatagttactwcact

SEQ ID NO: 956 - DNA, 24 bp, Artificial Sequence
  Description of Artificial Sequence: Synthetic oligonucleotide
swmcagtacvrmagttactwcact

SEQ ID NO: 957 - DNA, 24 bp, Artificial Sequence
  Description of Artificial Sequence: Synthetic oligonucleotide
swmcagtacaatmbctactwcact

SEQ ID NO: 958 - DNA, 24 bp, Artificial Sequence
  Description of Artificial Sequence: Synthetic oligonucleotide
swmcagtacaatagtywctwcact

SEQ ID NO: 959 - DNA, 24 bp, Artificial Sequence
  Description of Artificial Sequence: Synthetic oligonucleotide
cagswmbhcaatagttactwcact

SEQ ID NO: 960 - DNA, 24 bp, Artificial Sequence
  Description of Artificial Sequence: Synthetic oligonucleotide
cagswmtacvrmagttactwcact

SEQ ID NO: 961 - DNA, 24 bp, Artificial Sequence
  Description of Artificial Sequence: Synthetic oligonucleotide
cagswmtacaatmbctactwcact

SEQ ID NO: 962 - DNA, 24 bp, Artificial Sequence
  Description of Artificial Sequence: Synthetic oligonucleotide
cagswmtacaatagtywctwcact

SEQ ID NO: 963 - DNA, 24 bp, Artificial Sequence
  Description of Artificial Sequence: Synthetic oligonucleotide
swmswmtacaatagttacmtcact

SEQ ID NO: 964 - DNA, 24 bp, Artificial Sequence
  Description of Artificial Sequence: Synthetic oligonucleotide
cagcagbhcvrmagttacmtcact

SEQ ID NO: 965 - DNA, 24 bp, Artificial Sequence
  Description of Artificial Sequence: Synthetic oligonucleotide
cagcagbhcaatmbctacmtcact

SEQ ID NO: 966 - DNA, 24 bp, Artificial Sequence
  Description of Artificial Sequence: Synthetic oligonucleotide
cagcagbhcaatagtywcmtcact

SEQ ID NO: 967 - DNA, 24 bp, Artificial Sequence
  Description of Artificial Sequence: Synthetic oligonucleotide
cagcagtacvrmmbctacmtcact

SEQ ID NO: 968 - DNA, 24 bp, Artificial Sequence
  Description of Artificial Sequence: Synthetic oligonucleotide
cagcagtacvrmagtywcmtcact

SEQ ID NO: 969 - DNA, 24 bp, Artificial Sequence
  Description of Artificial Sequence: Synthetic oligonucleotide
cagcagtacaatmbcywcmtcact

SEQ ID NO: 970 - DNA, 24 bp, Artificial Sequence
  Description of Artificial Sequence: Synthetic oligonucleotide
swmcagbhcaatagttacmtcact

SEQ ID NO: 971 - DNA, 24 bp, Artificial Sequence
  Description of Artificial Sequence: Synthetic oligonucleotide
swmcagtacvrmagttacmtcact

SEQ ID NO: 972 - DNA, 24 bp, Artificial Sequence
  Description of Artificial Sequence: Synthetic oligonucleotide
swmcagtacaatmbctacmtcact

SEQ ID NO: 973 - DNA, 24 bp, Artificial Sequence
  Description of Artificial Sequence: Synthetic oligonucleotide
swmcagtacaatagtywcmtcact

SEQ ID NO: 974 - DNA, 24 bp, Artificial Sequence
  Description of Artificial Sequence: Synthetic oligonucleotide
cagswmbhcaatagttacmtcact

SEQ ID NO: 975 - DNA, 24 bp, Artificial Sequence
  Description of Artificial Sequence: Synthetic oligonucleotide
cagswmtacvrmagttacmtcact

SEQ ID NO: 976 - DNA, 24 bp, Artificial Sequence
  Description of Artificial Sequence: Synthetic oligonucleotide
cagswmtacaatmbctacmtcact

SEQ ID NO: 977 - DNA, 24 bp, Artificial Sequence
  Description of Artificial Sequence: Synthetic oligonucleotide
cagswmtacaatagtywcmtcact

SEQ ID NO: 978 - DNA, 24 bp, Artificial Sequence
  Description of Artificial Sequence: Synthetic oligonucleotide
swmswmtacaatagttacwggact

SEQ ID NO: 979 - DNA, 24 bp, Artificial Sequence
  Description of Artificial Sequence: Synthetic oligonucleotide
cagcagbhcvrmagttacwggact

SEQ ID NO: 980 - DNA, 24 bp, Artificial Sequence
  Description of Artificial Sequence: Synthetic oligonucleotide
cagcagbhcaatmbctacwggact

SEQ ID NO: 981 - DNA, 24 bp, Artificial Sequence
  Description of Artificial Sequence: Synthetic oligonucleotide
cagcagbhcaatagtywcwggact

SEQ ID NO: 982 - DNA, 24 bp, Artificial Sequence
  Description of Artificial Sequence: Synthetic oligonucleotide
cagcagtacvrmmbctacwggact

SEQ ID NO: 983 - DNA, 24 bp, Artificial Sequence
  Description of Artificial Sequence: Synthetic oligonucleotide
cagcagtacvrmagtywcwggact

SEQ ID NO: 984 - DNA, 24 bp, Artificial Sequence
  Description of Artificial Sequence: Synthetic oligonucleotide
cagcagtacaatmbcywcwggact

SEQ ID NO: 985 - DNA, 24 bp, Artificial Sequence
  Description of Artificial Sequence: Synthetic oligonucleotide
swmcagbhcaatagttacwggact

SEQ ID NO: 986 - DNA, 24 bp, Artificial Sequence
  Description of Artificial Sequence: Synthetic oligonucleotide
swmcagtacvrmagttacwggact

SEQ ID NO: 987 - DNA, 24 bp, Artificial Sequence
  Description of Artificial Sequence: Synthetic oligonucleotide
swmcagtacaatmbctacwggact

SEQ ID NO: 988 - DNA, 24 bp, Artificial Sequence
  Description of Artificial Sequence: Synthetic oligonucleotide
swmcagtacaatagtywcwggact

SEQ ID NO: 989 - DNA, 24 bp, Artificial Sequence
  Description of Artificial Sequence: Synthetic oligonucleotide
cagswmbhcaatagttacwggact

SEQ ID NO: 990 - DNA, 24 bp, Artificial Sequence
  Description of Artificial Sequence: Synthetic oligonucleotide
cagswmtacvrmagttacwggact

SEQ ID NO: 991 - DNA, 24 bp, Artificial Sequence
  Description of Artificial Sequence: Synthetic oligonucleotide
cagswmtacaatmbctacwggact

SEQ ID NO: 992 - DNA, 24 bp, Artificial Sequence
  Description of Artificial Sequence: Synthetic oligonucleotide
cagswmtacaatagtywcwggact

SEQ ID NO: 993 - DNA, 24 bp, Artificial Sequence
  Description of Artificial Sequence: Synthetic oligonucleotide
swmswmtacaatagttaccctact

SEQ ID NO: 994 - DNA, 24 bp, Artificial Sequence
  Description of Artificial Sequence: Synthetic oligonucleotide
cagcagbhcvrmagttaccctact

SEQ ID NO: 995 - DNA, 24 bp, Artificial Sequence
  Description of Artificial Sequence: Synthetic oligonucleotide
cagcagbhcaatmbctaccctact

SEQ ID NO: 996 - DNA, 24 bp, Artificial Sequence
  Description of Artificial Sequence: Synthetic oligonucleotide
cagcagbhcaatagtywccctact

SEQ ID NO: 997 - DNA, 24 bp, Artificial Sequence
  Description of Artificial Sequence: Synthetic oligonucleotide
cagcagtacvrmmbctaccctact

SEQ ID NO: 998 - DNA, 24 bp, Artificial Sequence
  Description of Artificial Sequence: Synthetic oligonucleotide
cagcagtacvrmagtywccctact

SEQ ID NO: 999 - DNA, 24 bp, Artificial Sequence
  Description of Artificial Sequence: Synthetic oligonucleotide
cagcagtacaatmbcywccctact

SEQ ID NO: 1000 - DNA, 24 bp, Artificial Sequence
  Description of Artificial Sequence: Synthetic oligonucleotide
swmcagbhcaatagttaccctact

SEQ ID NO: 1001 - DNA, 24 bp, Artificial Sequence
  Description of Artificial Sequence: Synthetic oligonucleotide
swmcagtacvrmagttaccctact

SEQ ID NO: 1002 - DNA, 24 bp, Artificial Sequence
  Description of Artificial Sequence: Synthetic oligonucleotide
swmcagtacaatmbctaccctact

SEQ ID NO: 1003 - DNA, 24 bp, Artificial Sequence
  Description of Artificial Sequence: Synthetic oligonucleotide
swmcagtacaatagtywccctact

SEQ ID NO: 1004 - DNA, 24 bp, Artificial Sequence
  Description of Artificial Sequence: Synthetic oligonucleotide
cagswmbhcaatagttaccctact

SEQ ID NO: 1005 - DNA, 24 bp, Artificial Sequence
  Description of Artificial Sequence: Synthetic oligonucleotide
cagswmtacvrmagttaccctact

SEQ ID NO: 1006 - DNA, 24 bp, Artificial Sequence
  Description of Artificial Sequence: Synthetic oligonucleotide
cagswmtacaatmbctaccctact

SEQ ID NO: 1007 - DNA, 24 bp, Artificial Sequence
  Description of Artificial Sequence: Synthetic oligonucleotide
cagswmtacaatagtywccctact

SEQ ID NO: 1008 - DNA, 24 bp, Artificial Sequence
  Description of Artificial Sequence: Synthetic oligonucleotide
swmswmgcaaatagtttctwcact

SEQ ID NO: 1009 - DNA, 24 bp, Artificial Sequence
  Description of Artificial Sequence: Synthetic oligonucleotide
  modified_base (8)..(8): a, c, t or g
  modified_base (10)..(10): a, c, t or g
cagcagrnanhcagtttctwcact

SEQ ID NO: 1010 - DNA, 24 bp, Artificial Sequence
  Description of Artificial Sequence: Synthetic oligonucleotide
  modified_base (8)..(8): a, c, t or g
  modified_base (13)..(13): a, c, t or g
cagcagrnaaatnhcttctwcact

SEQ ID NO: 1011 - DNA, 24 bp, Artificial Sequence
  Description of Artificial Sequence: Synthetic oligonucleotide
  modified_base (8)..(8): a, c, t or g
cagcagrnaaatagtywctwcact

SEQ ID NO: 1012 - DNA, 24 bp, Artificial Sequence
  Description of Artificial Sequence: Synthetic oligonucleotide
  modified_base (10)..(10): a, c, t or g
  modified_base (13)..(13): a, c, t or g
cagcaggcanhcnhcttctwcact

SEQ ID NO: 1013 - DNA, 24 bp, Artificial Sequence
  Description of Artificial Sequence: Synthetic oligonucleotide
  modified_base (10)..(10): a, c, t or g
cagcaggcanhcagtywctwcact

SEQ ID NO: 1014 - DNA, 24 bp, Artificial Sequence
  Description of Artificial Sequence: Synthetic oligonucleotide
  modified_base (13)..(13): a, c, t or g
cagcaggcaaatnhcywctwcact

SEQ ID NO: 1015 - DNA, 24 bp, Artificial Sequence
  Description of Artificial Sequence: Synthetic oligonucleotide
  modified_base (8)..(8): a, c, t or g
swmcagrnaaatagtttctwcact

SEQ ID NO: 1016 - DNA, 24 bp, Artificial Sequence
  Description of Artificial Sequence: Synthetic oligonucleotide
  modified_base (10)..(10): a, c, t or g
swmcaggcanhcagtttctwcact

SEQ ID NO: 1017 - DNA, 24 bp, Artificial Sequence
  Description of Artificial Sequence: Synthetic oligonucleotide
  modified_base (13)..(13): a, c, t or g
swmcaggcaaatnhcttctwcact

SEQ ID NO: 1018 - DNA, 24 bp, Artificial Sequence
  Description of Artificial Sequence: Synthetic oligonucleotide
swmcaggcaaatagtywctwcact

SEQ ID NO: 1019 - DNA, 24 bp, Artificial Sequence
  Description of Artificial Sequence: Synthetic oligonucleotide
  modified_base (8)..(8): a, c, t or g
cagswmrnaaatagtttctwcact

SEQ ID NO: 1020 - DNA, 24 bp, Artificial Sequence
  Description of Artificial Sequence: Synthetic oligonucleotide
  modified_base (10)..(10): a, c, t or g
cagswmgcanhcagtttctwcact

SEQ ID NO: 1021 - DNA, 24 bp, Artificial Sequence
  Description of Artificial Sequence: Synthetic oligonucleotide
  modified_base (13)..(13): a, c, t or g
cagswmgcaaatnhcttctwcact

SEQ ID NO: 1022 - DNA, 24 bp, Artificial Sequence
  Description of Artificial Sequence: Synthetic oligonucleotide
cagswmgcaaatagtywctwcact

SEQ ID NO: 1023 - DNA, 24 bp, Artificial Sequence
  Description of Artificial Sequence: Synthetic oligonucleotide
swmswmgcaaatagtttcmtcact

SEQ ID NO: 1024 - DNA, 24 bp, Artificial Sequence
  Description of Artificial Sequence: Synthetic oligonucleotide
  modified_base (8)..(8): a, c, t or g
  modified_base (10)..(10): a, c, t or g
cagcagrnanhcagtttcmtcact

SEQ ID NO: 1025 - DNA, 24 bp, Artificial Sequence
  Description of Artificial Sequence: Synthetic oligonucleotide
  modified_base (8)..(8): a, c, t or g
  modified_base (13)..(13): a, c, t or g
cagcagrnaaatnhcttcmtcact

SEQ ID NO: 1026 - DNA, 24 bp, Artificial Sequence
  Description of Artificial Sequence: Synthetic oligonucleotide
  modified_base (8)..(8): a, c, t or g
cagcagrnaaatagtywcmtcact

SEQ ID NO: 1027 - DNA, 24 bp, Artificial Sequence
  Description of Artificial Sequence: Synthetic oligonucleotide
  modified_base (10)..(10): a, c, t or g
  modified_base (13)..(13): a, c, t or g
cagcaggcanhcnhcttcmtcact

SEQ ID NO: 1028 - DNA, 24 bp, Artificial Sequence
  Description of Artificial Sequence: Synthetic oligonucleotide
  modified_base (10)..(10): a, c, t or g
cagcaggcanhcagtywcmtcact

SEQ ID NO: 1029 - DNA, 24 bp, Artificial Sequence
  Description of Artificial Sequence: Synthetic oligonucleotide
  modified_base (13)..(13): a, c, t or g
cagcaggcaaatnhcywcmtcact

SEQ ID NO: 1030 - DNA, 24 bp, Artificial Sequence
  Description of Artificial Sequence: Synthetic oligonucleotide
  modified_base (8)..(8): a, c, t or g
swmcagrnaaatagtttcmtcact

SEQ ID NO: 1031 - DNA, 24 bp, Artificial Sequence
  Description of Artificial Sequence: Synthetic oligonucleotide
  modified_base (10)..(10): a, c, t or g
swmcaggcanhcagtttcmtcact

SEQ ID NO: 1032 - DNA, 24 bp, Artificial Sequence
  Description of Artificial Sequence: Synthetic oligonucleotide
  modified_base (13)..(13): a, c, t or g
swmcaggcaaatnhcttcmtcact

SEQ ID NO: 1033 - DNA, 24 bp, Artificial Sequence
  Description of Artificial Sequence: Synthetic oligonucleotide
swmcaggcaaatagtywcmtcact

SEQ ID NO: 1034 - DNA, 24 bp, Artificial Sequence
  Description of Artificial Sequence: Synthetic oligonucleotide
  modified_base (8)..(8): a, c, t or g
cagswmrnaaatagtttcmtcact

SEQ ID NO: 1035 - DNA, 24 bp, Artificial Sequence
  Description of Artificial Sequence: Synthetic oligonucleotide
  modified_base (10)..(10): a, c, t or g
cagswmgcanhcagtttcmtcact

SEQ ID NO: 1036 - DNA, 24 bp, Artificial Sequence
  Description of Artificial Sequence: Synthetic oligonucleotide
  modified_base (13)..(13): a, c, t or g
cagswmgcaaatnhcttcmtcact

SEQ ID NO: 1037 - DNA, 24 bp, Artificial Sequence
  Description of Artificial Sequence: Synthetic oligonucleotide
cagswmgcaaatagtywcmtcact

SEQ ID NO: 1038 - DNA, 24 bp, Artificial Sequence
  Description of Artificial Sequence: Synthetic oligonucleotide
swmswmgcaaatagtttcwggact

SEQ ID NO: 1039 - DNA, 24 bp, Artificial Sequence
  Description of Artificial Sequence: Synthetic oligonucleotide
  modified_base (8)..(8): a, c, t or g
  modified_base (10)..(10): a, c, t or g
cagcagrnanhcagtttcwggact

SEQ ID NO: 1040 - DNA, 24 bp, Artificial Sequence
  Description of Artificial Sequence: Synthetic oligonucleotide
  modified_base (8)..(8): a, c, t or g
  modified_base (13)..(13): a, c, t or g
cagcagrnaaatnhcttcwggact

SEQ ID NO: 1041 - DNA, 24 bp, Artificial Sequence
  Description of Artificial Sequence: Synthetic oligonucleotide
  modified_base (8)..(8): a, c, t or g
cagcagrnaaatagtywcwggact

SEQ ID NO: 1042 - DNA, 24 bp, Artificial Sequence
  Description of Artificial Sequence: Synthetic oligonucleotide
  modified_base (10)..(10): a, c, t or g
  modified_base (13)..(13): a, c, t or g
cagcaggcanhcnhcttcwggact

SEQ ID NO: 1043 - DNA, 24 bp, Artificial Sequence
  Description of Artificial Sequence: Synthetic oligonucleotide
  modified_base (10)..(10): a, c, t or g
cagcaggcanhcagtywcwggact

SEQ ID NO: 1044 - DNA, 24 bp, Artificial Sequence
  Description of Artificial Sequence: Synthetic oligonucleotide
  modified_base (13)..(13): a, c, t or g
cagcaggcaaatnhcywcwggact

SEQ ID NO: 1045 - DNA, 24 bp, Artificial Sequence
  Description of Artificial Sequence: Synthetic oligonucleotide
  modified_base (8)..(8): a, c, t or g
swmcagrnaaatagtttcwggact

SEQ ID NO: 1046 - DNA, 24 bp, Artificial Sequence
  Description of Artificial Sequence: Synthetic oligonucleotide
  modified_base (10)..(10): a, c, t or g
swmcaggcanhcagtttcwggact

SEQ ID NO: 1047 - DNA, 24 bp, Artificial Sequence
  Description of Artificial Sequence: Synthetic oligonucleotide
  modified_base (13)..(13): a, c, t or g
swmcaggcaaatnhcttcwggact

SEQ ID NO: 1048 - DNA, 24 bp, Artificial Sequence
  Description of Artificial Sequence: Synthetic oligonucleotide
swmcaggcaaatagtywcwggact

SEQ ID NO: 1049 - DNA, 24 bp, Artificial Sequence
  Description of Artificial Sequence: Synthetic oligonucleotide
  modified_base (8)..(8): a, c, t or g
cagswmrnaaatagtttcwggact

SEQ ID NO: 1050 - DNA, 24 bp, Artificial Sequence
  Description of Artificial Sequence: Synthetic oligonucleotide
  modified_base (10)..(10): a, c, t or g
cagswmgcanhcagtttcwggact

SEQ ID NO: 1051 - DNA, 24 bp, Artificial Sequence
  Description of Artificial Sequence: Synthetic oligonucleotide
  modified_base (13)..(13): a, c, t or g
cagswmgcaaatnhcttcwggact

SEQ ID NO: 1052 - DNA, 24 bp, Artificial Sequence
  Description of Artificial Sequence: Synthetic oligonucleotide
cagswmgcaaatagtywcwggact

SEQ ID NO: 1053 - DNA, 24 bp, Artificial Sequence
  Description of Artificial Sequence: Synthetic oligonucleotide
swmswmgcaaatagtttccctact

SEQ ID NO: 1054 - DNA, 24 bp, Artificial Sequence
  Description of Artificial Sequence: Synthetic oligonucleotide
  modified_base (8)..(8): a, c, t or g
  modified_base (10)..(10): a, c, t or g
cagcagrnanhcagtttccctact

SEQ ID NO: 1055 - DNA, 24 bp, Artificial Sequence
  Description of Artificial Sequence: Synthetic oligonucleotide
  modified_base (8)..(8): a, c, t or g
  modified_base (13)..(13): a, c, t or g
cagcagrnaaatnhcttccctact

SEQ ID NO: 1056 - DNA, 24 bp, Artificial Sequence
  Description of Artificial Sequence: Synthetic oligonucleotide
  modified_base (8)..(8): a, c, t or g
cagcagrnaaatagtywccctact

SEQ ID NO: 1057 - DNA, 24 bp, Artificial Sequence
  Description of Artificial Sequence: Synthetic oligonucleotide
  modified_base (10)..(10): a, c, t or g
  modified_base (13)..(13): a, c, t or g
cagcaggcanhcnhcttccctact

SEQ ID NO: 1058 - DNA, 24 bp, Artificial Sequence
  Description of Artificial Sequence: Synthetic oligonucleotide
  modified_base (10)..(10): a, c, t or g
cagcaggcanhcagtywccctact

SEQ ID NO: 1059 - DNA, 24 bp, Artificial Sequence
  Description of Artificial Sequence: Synthetic oligonucleotide
  modified_base (13)..(13): a, c, t or g
cagcaggcaaatnhcywccctact

SEQ ID NO: 1060 - DNA, 24 bp, Artificial Sequence
  Description of Artificial Sequence: Synthetic oligonucleotide
  modified_base (8)..(8): a, c, t or g
swmcagrnaaatagtttccctact

SEQ ID NO: 1061 - DNA, 24 bp, Artificial Sequence
  Description of Artificial Sequence: Synthetic oligonucleotide
  modified_base (10)..(10): a, c, t or g
swmcaggcanhcagtttccctact

SEQ ID NO: 1062 - DNA, 24 bp, Artificial Sequence
  Description of Artificial Sequence: Synthetic oligonucleotide
  modified_base (13)..(13): a, c, t or g
swmcaggcaaatnhcttccctact

SEQ ID NO: 1063 - DNA, 24 bp, Artificial Sequence
  Description of Artificial Sequence: Synthetic oligonucleotide
swmcaggcaaatagtywccctact

SEQ ID NO: 1064 - DNA, 24 bp, Artificial Sequence
  Description of Artificial Sequence: Synthetic oligonucleotide
  modified_base (8)..(8): a, c, t or g
cagswmrnaaatagtttccctact

SEQ ID NO: 1065 - DNA, 24 bp, Artificial Sequence
  Description of Artificial Sequence: Synthetic oligonucleotide
  modified_base (10)..(10): a, c, t or g
cagswmgcanhcagtttccctact

SEQ ID NO: 1066 - DNA, 24 bp, Artificial Sequence
  Description of Artificial Sequence: Synthetic oligonucleotide
  modified_base (13)..(13): a, c, t or g
cagswmgcaaatnhcttccctact

SEQ ID NO: 1067 - DNA, 24 bp, Artificial Sequence
  Description of Artificial Sequence: Synthetic oligonucleotide
cagswmgcaaatagtywccctact

SEQ ID NO: 1068 - DNA, 24 bp, Artificial Sequence
  Description of Artificial Sequence: Synthetic oligonucleotide
swmswmtacgataatctctwcact

SEQ ID NO: 1069 - DNA, 24 bp, Artificial Sequence
  Description of Artificial Sequence: Synthetic oligonucleotide
  modified_base (10)..(10): a, c, t or g
cagcagbhcnhcaatctctwcact

SEQ ID NO: 1070 - DNA, 24 bp, Artificial Sequence
  Description of Artificial Sequence: Synthetic oligonucleotide
  modified_base (13)..(13): a, c, t or g
cagcagbhcgatnhcctctwcact

SEQ ID NO: 1071 - DNA, 24 bp, Artificial Sequence
  Description of Artificial Sequence: Synthetic oligonucleotide
cagcagbhcgataatywctwcact

SEQ ID NO: 1072 - DNA, 24 bp, Artificial Sequence
  Description of Artificial Sequence: Synthetic oligonucleotide
  modified_base (10)..(10): a, c, t or g
  modified_base (13)..(13): a, c, t or g
cagcagtacnhcnhcctctwcact

SEQ ID NO: 1073 - DNA, 24 bp, Artificial Sequence
  Description of Artificial Sequence: Synthetic oligonucleotide
  modified_base (10)..(10): a, c, t or g
cagcagtacnhcaatywctwcact

SEQ ID NO: 1074 - DNA, 24 bp, Artificial Sequence
  Description of Artificial Sequence: Synthetic oligonucleotide
  modified_base (13)..(13): a, c, t or g
cagcagtacgatnhcywctwcact

SEQ ID NO: 1075 - DNA, 24 bp, Artificial Sequence
  Description of Artificial Sequence: Synthetic oligonucleotide
swmcagbhcgataatctctwcact

SEQ ID NO: 1076 - DNA, 24 bp, Artificial Sequence
  Description of Artificial Sequence: Synthetic oligonucleotide
  modified_base (10)..(10): a, c, t or g
swmcagtacnhcaatctctwcact

SEQ ID NO: 1077 - DNA, 24 bp, Artificial Sequence
  Description of Artificial Sequence: Synthetic oligonucleotide
  modified_base (13)..(13): a, c, t or g
swmcagtacgatnhcctctwcact

SEQ ID NO: 1078 - DNA, 24 bp, Artificial Sequence
  Description of Artificial Sequence: Synthetic oligonucleotide
swmcagtacgataatywctwcact

SEQ ID NO: 1079 - DNA, 24 bp, Artificial Sequence
  Description of Artificial Sequence: Synthetic oligonucleotide
cagswmbhcgataatctctwcact

SEQ ID NO: 1080 - DNA, 24 bp, Artificial Sequence
  Description of Artificial Sequence: Synthetic oligonucleotide
  modified_base (10)..(10): a, c, t or g
cagswmtacnhcaatctctwcact

SEQ ID NO: 1081 - DNA, 24 bp, Artificial Sequence
  Description of Artificial Sequence: Synthetic oligonucleotide
  modified_base (13)..(13): a, c, t or g
cagswmtacgatnhcctctwcact

SEQ ID NO: 1082 - DNA, 24 bp, Artificial Sequence
  Description of Artificial Sequence: Synthetic oligonucleotide
cagswmtacgataatywctwcact

SEQ ID NO: 1083 - DNA, 24 bp, Artificial Sequence
  Description of Artificial Sequence: Synthetic oligonucleotide
swmswmtacgataatctcmtcact

SEQ ID NO: 1084 - DNA, 24 bp, Artificial Sequence
  Description of Artificial Sequence: Synthetic oligonucleotide
  modified_base (10)..(10): a, c, t or g
cagcagbhcnhcaatctcmtcact

SEQ ID NO: 1085 - DNA, 24 bp, Artificial Sequence
  Description of Artificial Sequence: Synthetic oligonucleotide
  modified_base (13)..(13): a, c, t or g
cagcagbhcgatnhcctcmtcact

SEQ ID NO: 1086 - DNA, 24 bp, Artificial Sequence
  Description of Artificial Sequence: Synthetic oligonucleotide
cagcagbhcgataatywcmtcact

SEQ ID NO: 1087 - DNA, 24 bp, Artificial Sequence
  Description of Artificial Sequence: Synthetic oligonucleotide
  modified_base (10)..(10): a, c, t or g
  modified_base (13)..(13): a, c, t or g
cagcagtacnhcnhcctcmtcact

SEQ ID NO: 1088 - DNA, 24 bp, Artificial Sequence
  Description of Artificial Sequence: Synthetic oligonucleotide
  modified_base (10)..(10): a, c, t or g
cagcagtacnhcaatywcmtcact

SEQ ID NO: 1089 - DNA, 24 bp, Artificial Sequence
  Description of Artificial Sequence: Synthetic oligonucleotide
  modified_base (13)..(13): a, c, t or g
cagcagtacgatnhcywcmtcact

SEQ ID NO: 1090 - DNA, 24 bp, Artificial Sequence
  Description of Artificial Sequence: Synthetic oligonucleotide
swmcagbhcgataatctcmtcact

SEQ ID NO: 1091 - DNA, 24 bp, Artificial Sequence
  Description of Artificial Sequence: Synthetic oligonucleotide
  modified_base (10)..(10): a, c, t or g
swmcagtacnhcaatctcmtcact

SEQ ID NO: 1092 - DNA, 24 bp, Artificial Sequence
  Description of Artificial Sequence: Synthetic oligonucleotide
  modified_base (13)..(13): a, c, t or g
swmcagtacgatnhcctcmtcact

SEQ ID NO: 1093 - DNA, 24 bp, Artificial Sequence
  Description of Artificial Sequence: Synthetic oligonucleotide
swmcagtacgataatywcmtcact

SEQ ID NO: 1094 - DNA, 24 bp, Artificial Sequence
  Description of Artificial Sequence: Synthetic oligonucleotide
cagswmbhcgataatctcmtcact

SEQ ID NO: 1095 - DNA, 24 bp, Artificial Sequence
  Description of Artificial Sequence: Synthetic oligonucleotide
  modified_base (10)..(10): a, c, t or g
cagswmtacnhcaatctcmtcact

SEQ ID NO: 1096 - DNA, 24 bp, Artificial Sequence
  Description of Artificial Sequence: Synthetic oligonucleotide
  modified_base (13)..(13): a, c, t or g
cagswmtacgatnhcctcmtcact

SEQ ID NO: 1097 - DNA, 24 bp, Artificial Sequence
  Description of Artificial Sequence: Synthetic oligonucleotide
cagswmtacgataatywcmtcact

SEQ ID NO: 1098 - DNA, 24 bp, Artificial Sequence
  Description of Artificial Sequence: Synthetic oligonucleotide
swmswmtacgataatctcwggact

SEQ ID NO: 1099 - DNA, 24 bp, Artificial Sequence
  Description of Artificial Sequence: Synthetic oligonucleotide
  modified_base (10)..(10): a, c, t or g
cagcagbhcnhcaatctcwggact

SEQ ID NO: 1100 - DNA, 24 bp, Artificial Sequence
  Description of Artificial Sequence: Synthetic oligonucleotide
  modified_base (13)..(13): a, c, t or g
cagcagbhcgatnhcctcwggact

SEQ ID NO: 1101 - DNA, 24 bp, Artificial Sequence
  Description of Artificial Sequence: Synthetic oligonucleotide
cagcagbhcgataatywcwggact

SEQ ID NO: 1102 - DNA, 24 bp, Artificial Sequence
  Description of Artificial Sequence: Synthetic oligonucleotide
  modified_base (10)..(10): a, c, t or g
  modified_base (13)..(13): a, c, t or g
cagcagtacnhcnhcctcwggact

SEQ ID NO: 1103 - DNA, 24 bp, Artificial Sequence
  Description of Artificial Sequence: Synthetic oligonucleotide
  modified_base (10)..(10): a, c, t or g
cagcagtacnhcaatywcwggact

SEQ ID NO: 1104 - DNA, 24 bp, Artificial Sequence
  Description of Artificial Sequence: Synthetic oligonucleotide
  modified_base (13)..(13): a, c, t or g
cagcagtacgatnhcywcwggact

SEQ ID NO: 1105 - DNA, 24 bp, Artificial Sequence
  Description of Artificial Sequence: Synthetic oligonucleotide
swmcagbhcgataatctcwggact

SEQ ID NO: 1106 - DNA, 24 bp, Artificial Sequence
  Description of Artificial Sequence: Synthetic oligonucleotide
  modified_base (10)..(10): a, c, t or g
swmcagtacnhcaatctcwggact

SEQ ID NO: 1107 - DNA, 24 bp, Artificial Sequence
  Description of Artificial Sequence: Synthetic oligonucleotide
  modified_base (13)..(13): a, c, t or g
swmcagtacgatnhcctcwggact

SEQ ID NO: 1108 - DNA, 24 bp, Artificial Sequence
  Description of Artificial Sequence: Synthetic oligonucleotide
swmcagtacgataatywcwggact

SEQ ID NO: 1109 - DNA, 24 bp, Artificial Sequence
  Description of Artificial Sequence: Synthetic oligonucleotide
cagswmbhcgataatctcwggact

SEQ ID NO: 1110 - DNA, 24 bp, Artificial Sequence
  Description of Artificial Sequence: Synthetic oligonucleotide
  modified_base (10)..(10): a, c, t or g
cagswmtacnhcaatctcwggact

SEQ ID NO: 1111 - DNA, 24 bp, Artificial Sequence
  Description of Artificial Sequence: Synthetic oligonucleotide
  modified_base (13)..(13): a, c, t or g
cagswmtacgatnhcctcwggact

SEQ ID NO: 1112 - DNA, 24 bp, Artificial Sequence
  Description of Artificial Sequence: Synthetic oligonucleotide
cagswmtacgataatywcwggact

SEQ ID NO: 1113 - DNA, 24 bp, Artificial Sequence
  Description of Artificial Sequence: Synthetic oligonucleotide
swmswmtacgataatctccctact

SEQ ID NO: 1114 - DNA, 24 bp, Artificial Sequence
  Description of Artificial Sequence: Synthetic oligonucleotide
  modified_base (10)..(10): a, c, t or g
cagcagbhcnhcaatctccctact

SEQ ID NO: 1115 - DNA, 24 bp, Artificial Sequence
  Description of Artificial Sequence: Synthetic oligonucleotide
  modified_base (13)..(13): a, c, t or g
cagcagbhcgatnhcctccctact

SEQ ID NO: 1116 - DNA, 24 bp, Artificial Sequence
  Description of Artificial Sequence: Synthetic oligonucleotide
cagcagbhcgataatywccctact

SEQ ID NO: 1117 - DNA, 24 bp, Artificial Sequence
  Description of Artificial Sequence: Synthetic oligonucleotide
  modified_base (10)..(10): a, c, t or g
  modified_base (13)..(13): a, c, t or g
cagcagtacnhcnhcctccctact

SEQ ID NO: 1118 - DNA, 24 bp, Artificial Sequence
  Description of Artificial Sequence: Synthetic oligonucleotide
  modified_base (10)..(10): a, c, t or g
cagcagtacnhcaatywccctact

SEQ ID NO: 1119 - DNA, 24 bp, Artificial Sequence
  Description of Artificial Sequence: Synthetic oligonucleotide
  modified_base (13)..(13): a, c, t or g
cagcagtacgatnhcywccctact

SEQ ID NO: 1120 - DNA, 24 bp, Artificial Sequence
  Description of Artificial Sequence: Synthetic oligonucleotide
swmcagbhcgataatctccctact

SEQ ID NO: 1121 - DNA, 24 bp, Artificial Sequence
  Description of Artificial Sequence: Synthetic oligonucleotide
  modified_base (10)..(10): a, c, t or g
swmcagtacnhcaatctccctact

SEQ ID NO: 1122 - DNA, 24 bp, Artificial Sequence
  Description of Artificial Sequence: Synthetic oligonucleotide
  modified_base (13)..(13): a, c, t or g
swmcagtacgatnhcctccctact

SEQ ID NO: 1123 - DNA, 24 bp, Artificial Sequence
  Description of Artificial Sequence: Synthetic oligonucleotide
swmcagtacgataatywccctact

SEQ ID NO: 1124 - DNA, 24 bp, Artificial Sequence
  Description of Artificial Sequence: Synthetic oligonucleotide
cagswmbhcgataatctccctact

SEQ ID NO: 1125 - DNA, 24 bp, Artificial Sequence
  Description of Artificial Sequence: Synthetic oligonucleotide
  modified_base (10)..(10): a, c, t or g
cagswmtacnhcaatctccctact

SEQ ID NO: 1126 - DNA, 24 bp, Artificial Sequence
  Description of Artificial Sequence: Synthetic oligonucleotide
  modified_base (13)..(13): a, c, t or g
cagswmtacgatnhcctccctact

SEQ ID NO: 1127 - DNA, 24 bp, Artificial Sequence
  Description of Artificial Sequence: Synthetic oligonucleotide
cagswmtacgataatywccctact

SEQ ID NO: 1128 - DNA, 24 bp, Artificial Sequence
  Description of Artificial Sequence: Synthetic oligonucleotide
swmswmagctacagtacttwcact

SEQ ID NO: 1129 - DNA, 24 bp, Artificial Sequence
  Description of Artificial Sequence: Synthetic oligonucleotide
  modified_base (8)..(8): a, c, t or g
cagcaavnabhcagtacttwcact

SEQ ID NO: 1130 - DNA, 24 bp, Artificial Sequence
  Description of Artificial Sequence: Synthetic oligonucleotide
  modified_base (8)..(8): a, c, t or g
  modified_base (13)..(13): a, c, t or g
cagcaavnatacnhcacttwcact

SEQ ID NO: 1131 - DNA, 24 bp, Artificial Sequence
  Description of Artificial Sequence: Synthetic oligonucleotide
  modified_base (8)..(8): a, c, t or g
cagcaavnatacagtbhctwcact

SEQ ID NO: 1132 - DNA, 24 bp, Artificial Sequence
  Description of Artificial Sequence: Synthetic oligonucleotide
  modified_base (13)..(13): a, c, t or g
cagcaaagcbhcnhcacttwcact

SEQ ID NO: 1133 - DNA, 24 bp, Artificial Sequence
  Description of Artificial Sequence: Synthetic oligonucleotide
cagcaaagcbhcagtbhctwcact

SEQ ID NO: 1134 - DNA, 24 bp, Artificial Sequence
  Description of Artificial Sequence: Synthetic oligonucleotide
  modified_base (13)..(13): a, c, t or g
cagcaaagctacnhcbhctwcact

SEQ ID NO: 1135 - DNA, 24 bp, Artificial Sequence
  Description of Artificial Sequence: Synthetic oligonucleotide
  modified_base (8)..(8): a, c, t or g
swmcaavnatacagtacttwcact

SEQ ID NO: 1136 - DNA, 24 bp, Artificial Sequence
  Description of Artificial Sequence: Synthetic oligonucleotide
swmcaaagcbhcagtacttwcact

SEQ ID NO: 1137 - DNA, 24 bp, Artificial Sequence
  Description of Artificial Sequence: Synthetic oligonucleotide
  modified_base (13)..(13): a, c, t or g
swmcaaagctacnhcacttwcact

SEQ ID NO: 1138 - DNA, 24 bp, Artificial Sequence
  Description of Artificial Sequence: Synthetic oligonucleotide
swmcaaagctacagtbhctwcact

SEQ ID NO: 1139 - DNA, 24 bp, Artificial Sequence
  Description of Artificial Sequence: Synthetic oligonucleotide
  modified_base (8)..(8): a, c, t or g
cagswmvnatacagtacttwcact

SEQ ID NO: 1140 - DNA, 24 bp, Artificial Sequence
  Description of Artificial Sequence: Synthetic oligonucleotide
cagswmagcbhcagtacttwcact

SEQ ID NO: 1141 - DNA, 24 bp, Artificial Sequence
  Description of Artificial Sequence: Synthetic oligonucleotide
  modified_base (13)..(13): a, c, t or g
cagswmagctacnhcacttwcact

SEQ ID NO: 1142 - DNA, 24 bp, Artificial Sequence
  Description of Artificial Sequence: Synthetic oligonucleotide
cagswmagctacagtbhctwcact

SEQ ID NO: 1143 - DNA, 24 bp, Artificial Sequence
  Description of Artificial Sequence: Synthetic oligonucleotide
swmswmagctacagtactmtcact

SEQ ID NO: 1144 - DNA, 24 bp, Artificial Sequence
  Description of Artificial Sequence: Synthetic oligonucleotide
  modified_base (8)..(8): a, c, t or g
cagcaavnabhcagtactmtcact

SEQ ID NO: 1145 - DNA, 24 bp, Artificial Sequence
  Description of Artificial Sequence: Synthetic oligonucleotide
  modified_base (8)..(8): a, c, t or g
  modified_base (13)..(13): a, c, t or g
cagcaavnatacnhcactmtcact

SEQ ID NO: 1146 - DNA, 24 bp, Artificial Sequence
  Description of Artificial Sequence: Synthetic oligonucleotide
  modified_base (8)..(8): a, c, t or g
cagcaavnatacagtbhcmtcact

SEQ ID NO: 1147 - DNA, 24 bp, Artificial Sequence
  Description of Artificial Sequence: Synthetic oligonucleotide
  modified_base (13)..(13): a, c, t or g
cagcaaagcbhcnhcactmtcact

SEQ ID NO: 1148 - DNA, 24 bp, Artificial Sequence
  Description of Artificial Sequence: Synthetic oligonucleotide
cagcaaagcbhcagtbhcmtcact

SEQ ID NO: 1149 - DNA, 24 bp, Artificial Sequence
  Description of Artificial Sequence: Synthetic oligonucleotide
  modified_base (13)..(13): a, c, t or g
cagcaaagctacnhcbhcmtcact

SEQ ID NO: 1150 - DNA, 24 bp, Artificial Sequence
  Description of Artificial Sequence: Synthetic oligonucleotide
  modified_base (8)..(8): a, c, t or g
swmcaavnatacagtactmtcact

SEQ ID NO: 1151 - DNA, 24 bp, Artificial Sequence
  Description of Artificial Sequence: Synthetic oligonucleotide
swmcaaagcbhcagtactmtcact

SEQ ID NO: 1152 - DNA, 24 bp, Artificial Sequence
  Description of Artificial Sequence: Synthetic oligonucleotide
  modified_base (13)..(13): a, c, t or g
swmcaaagctacnhcactmtcact

SEQ ID NO: 1153 - DNA, 24 bp, Artificial Sequence
  Description of Artificial Sequence: Synthetic oligonucleotide
swmcaaagctacagtbhcmtcact

SEQ ID NO: 1154 - DNA, 24 bp, Artificial Sequence
  Description of Artificial Sequence: Synthetic oligonucleotide
  modified_base (8)..(8): a, c, t or g
cagswmvnatacagtactmtcact

SEQ ID NO: 1155 - DNA, 24 bp, Artificial Sequence
  Description of Artificial Sequence: Synthetic oligonucleotide
cagswmagcbhcagtactmtcact

SEQ ID NO: 1156 - DNA, 24 bp, Artificial Sequence
  Description of Artificial Sequence: Synthetic oligonucleotide
  modified_base (13)..(13): a, c, t or g
cagswmagctacnhcactmtcact

SEQ ID NO: 1157 - DNA, 24 bp, Artificial Sequence
  Description of Artificial Sequence: Synthetic oligonucleotide
cagswmagctacagtbhcmtcact

SEQ ID NO: 1158 - DNA, 24 bp, Artificial Sequence
  Description of Artificial Sequence: Synthetic oligonucleotide
swmswmagctacagtactwggact

SEQ ID NO: 1159 - DNA, 24 bp, Artificial Sequence
  Description of Artificial Sequence: Synthetic oligonucleotide
  modified_base (8)..(8): a, c, t or g
cagcaavnabhcagtactwggact

SEQ ID NO: 1160 - DNA, 24 bp, Artificial Sequence
  Description of Artificial Sequence: Synthetic oligonucleotide
  modified_base (8)..(8): a, c, t or g
  modified_base (13)..(13): a, c, t or g
cagcaavnatacnhcactwggact

SEQ ID NO: 1161 - DNA, 24 bp, Artificial Sequence
  Description of Artificial Sequence: Synthetic oligonucleotide
  modified_base (8)..(8): a, c, t or g
cagcaavnatacagtbhcwggact

SEQ ID NO: 1162 - DNA, 24 bp, Artificial Sequence
  Description of Artificial Sequence: Synthetic oligonucleotide
  modified_base (13)..(13): a, c, t or g
cagcaaagcbhcnhcactwggact

SEQ ID NO: 1163 - DNA, 24 bp, Artificial Sequence
  Description of Artificial Sequence: Synthetic oligonucleotide
cagcaaagcbhcagtbhcwggact

SEQ ID NO: 1164 - DNA, 24 bp, Artificial Sequence
  Description of Artificial Sequence: Synthetic oligonucleotide
  modified_base (13)..(13): a, c, t or g
cagcaaagctacnhcbhcwggact

SEQ ID NO: 1165 - DNA, 24 bp, Artificial Sequence
  Description of Artificial Sequence: Synthetic oligonucleotide
  modified_base (8)..(8): a, c, t or g
swmcaavnatacagtactwggact

SEQ ID NO: 1166 - DNA, 24 bp, Artificial Sequence
  Description of Artificial Sequence: Synthetic oligonucleotide
swmcaaagcbhcagtactwggact

SEQ ID NO: 1167 - DNA, 24 bp, Artificial Sequence
  Description of Artificial Sequence: Synthetic oligonucleotide
  modified_base (13)..(13): a, c, t or g
swmcaaagctacnhcactwggact

SEQ ID NO: 1168 - DNA, 24 bp, Artificial Sequence
  Description of Artificial Sequence: Synthetic oligonucleotide
swmcaaagctacagtbhcwggact

SEQ ID NO: 1169 - DNA, 24 bp, Artificial Sequence
  Description of Artificial Sequence: Synthetic oligonucleotide
  modified_base (8)..(8): a, c, t or g
cagswmvnatacagtactwggact

SEQ ID NO: 1170 - DNA, 24 bp, Artificial Sequence
  Description of Artificial Sequence: Synthetic oligonucleotide
cagswmagcbhcagtactwggact

SEQ ID NO: 1171 - DNA, 24 bp, Artificial Sequence
  Description of Artificial Sequence: Synthetic oligonucleotide
  modified_base (13)..(13): a, c, t or g
cagswmagctacnhcactwggact

SEQ ID NO: 1172 - DNA, 24 bp, Artificial Sequence
  Description of Artificial Sequence: Synthetic oligonucleotide
cagswmagctacagtbhcwggact

SEQ ID NO: 1173 - DNA, 24 bp, Artificial Sequence
  Description of Artificial Sequence: Synthetic oligonucleotide
swmswmagctacagtactcctact

SEQ ID NO: 1174 - DNA, 24 bp, Artificial Sequence
  Description of Artificial Sequence: Synthetic oligonucleotide
  modified_base (8)..(8): a, c, t or g
cagcaavnabhcagtactcctact

SEQ ID NO: 1175 - DNA, 24 bp, Artificial Sequence
  Description of Artificial Sequence: Synthetic oligonucleotide
  modified_base (8)..(8): a, c, t or g
  modified_base (13)..(13): a, c, t or g
cagcaavnatacnhcactcctact

SEQ ID NO: 1176 - DNA, 24 bp, Artificial Sequence
  Description of Artificial Sequence: Synthetic oligonucleotide
  modified_base (8)..(8): a, c, t or g
cagcaavnatacagtbhccctact

SEQ ID NO: 1177 - DNA, 24 bp, Artificial Sequence
  Description of Artificial Sequence: Synthetic oligonucleotide
  modified_base (13)..(13): a, c, t or g
cagcaaagcbhcnhcactcctact

SEQ ID NO: 1178 - DNA, 24 bp, Artificial Sequence
  Description of Artificial Sequence: Synthetic oligonucleotide
cagcaaagcbhcagtbhccctact

SEQ ID NO: 1179 - DNA, 24 bp, Artificial Sequence
  Description of Artificial Sequence: Synthetic oligonucleotide
  modified_base (13)..(13): a, c, t or g
cagcaaagctacnhcbhccctact

SEQ ID NO: 1180 - DNA, 24 bp, Artificial Sequence
  Description of Artificial Sequence: Synthetic oligonucleotide
  modified_base (8)..(8): a, c, t or g
swmcaavnatacagtactcctact

SEQ ID NO: 1181 - DNA, 24 bp, Artificial Sequence
  Description of Artificial Sequence: Synthetic oligonucleotide
swmcaaagcbhcagtactcctact

SEQ ID NO: 1182 - DNA, 24 bp, Artificial Sequence
  Description of Artificial Sequence: Synthetic oligonucleotide
  modified_base (13)..(13): a, c, t or g
swmcaaagctacnhcactcctact

SEQ ID NO: 1183 - DNA, 24 bp, Artificial Sequence
  Description of Artificial Sequence: Synthetic oligonucleotide
swmcaaagctacagtbhccctact

SEQ ID NO: 1184 - DNA, 24 bp, Artificial Sequence
  Description of Artificial Sequence: Synthetic oligonucleotide
  modified_base (8)..(8): a, c, t or g
cagswmvnatacagtactcctact

SEQ ID NO: 1185 - DNA, 24 bp, Artificial Sequence
  Description of Artificial Sequence: Synthetic oligonucleotide
cagswmagcbhcagtactcctact

SEQ ID NO: 1186 - DNA, 24 bp, Artificial Sequence
  Description of Artificial Sequence: Synthetic oligonucleotide
  modified_base (13)..(13): a, c, t or g
cagswmagctacnhcactcctact

SEQ ID NO: 1187 - DNA, 24 bp, Artificial Sequence
  Description of Artificial Sequence: Synthetic oligonucleotide
cagswmagctacagtbhccctact

SEQ ID NO: 1188 - DNA, 24 bp, Artificial Sequence
  Description of Artificial Sequence: Synthetic oligonucleotide
dtsswmgcactccagacttwcact

SEQ ID NO: 1189 - DNA, 24 bp, Artificial Sequence
  Description of Artificial Sequence: Synthetic oligonucleotide
  modified_base (8)..(8): a, c, t or g
  modified_base (11)..(11): a, c, t or g
atgcagvnamnacagacttwcact

SEQ ID NO: 1190 - DNA, 24 bp, Artificial Sequence
  Description of Artificial Sequence: Synthetic oligonucleotide
  modified_base (8)..(8): a, c, t or g
atgcagvnactcsrmacttwcact

SEQ ID NO: 1191 - DNA, 24 bp, Artificial Sequence
  Description of Artificial Sequence: Synthetic oligonucleotide
  modified_base (8)..(8): a, c, t or g
atgcagvnactccagvbctwcact

SEQ ID NO: 1192 - DNA, 24 bp, Artificial Sequence
  Description of Artificial Sequence: Synthetic oligonucleotide
  modified_base (11)..(11): a, c, t or g
atgcaggcamnasrmacttwcact

SEQ ID NO: 1193 - DNA, 24 bp, Artificial Sequence
  Description of Artificial Sequence: Synthetic oligonucleotide
  modified_base (11)..(11): a, c, t or g
atgcaggcamnacagvbctwcact

SEQ ID NO: 1194 - DNA, 24 bp, Artificial Sequence
  Description of Artificial Sequence: Synthetic oligonucleotide
atgcaggcactcsrmvbctwcact

SEQ ID NO: 1195 - DNA, 24 bp, Artificial Sequence
  Description of Artificial Sequence: Synthetic oligonucleotide
  modified_base (8)..(8): a, c, t or g
dtscagvnactccagacttwcact

SEQ ID NO: 1196 - DNA, 24 bp, Artificial Sequence
  Description of Artificial Sequence: Synthetic oligonucleotide
  modified_base (11)..(11): a, c, t or g
dtscaggcamnacagacttwcact

SEQ ID NO: 1197 - DNA, 24 bp, Artificial Sequence
  Description of Artificial Sequence: Synthetic oligonucleotide
dtscaggcactcsrmacttwcact

SEQ ID NO: 1198 - DNA, 24 bp, Artificial Sequence
  Description of Artificial Sequence: Synthetic oligonucleotide
dtscaggcactccagvbctwcact

SEQ ID NO: 1199 - DNA, 24 bp, Artificial Sequence
  Description of Artificial Sequence: Synthetic oligonucleotide
  modified_base (8)..(8): a, c, t or g
atgswmvnactccagacttwcact

SEQ ID NO: 1200 - DNA, 24 bp, Artificial Sequence
  Description of Artificial Sequence: Synthetic oligonucleotide
  modified_base (11)..(11): a, c, t or g
atgswmgcamnacagacttwcact

SEQ ID NO: 1201 - DNA, 24 bp, Artificial Sequence
  Description of Artificial Sequence: Synthetic oligonucleotide
atgswmgcactcsrmacttwcact

SEQ ID NO: 1202 - DNA, 24 bp, Artificial Sequence
  Description of Artificial Sequence: Synthetic oligonucleotide
atgswmgcactccagvbctwcact

SEQ ID NO: 1203 - DNA, 24 bp, Artificial Sequence
  Description of Artificial Sequence: Synthetic oligonucleotide
dtsswmgcactccagactmtcact

SEQ ID NO: 1204 - DNA, 24 bp, Artificial Sequence
  Description of Artificial Sequence: Synthetic oligonucleotide
  modified_base (8)..(8): a, c, t or g
  modified_base (11)..(11): a, c, t or g
atgcagvnamnacagactmtcact

SEQ ID NO: 1205 - DNA, 24 bp, Artificial Sequence
  Description of Artificial Sequence: Synthetic oligonucleotide
  modified_base (8)..(8): a, c, t or g
atgcagvnactcsrmactmtcact

SEQ ID NO: 1206 - DNA, 24 bp, Artificial Sequence
  Description of Artificial Sequence: Synthetic oligonucleotide
  modified_base (8)..(8): a, c, t or g
atgcagvnactccagvbcmtcact

SEQ ID NO: 1207 - DNA, 24 bp, Artificial Sequence
  Description of Artificial Sequence: Synthetic oligonucleotide
  modified_base (11)..(11): a, c, t or g
atgcaggcamnasrmactmtcact

SEQ ID NO: 1208 - DNA, 24 bp, Artificial Sequence
  Description of Artificial Sequence: Synthetic oligonucleotide
  modified_base (11)..(11): a, c, t or g
atgcaggcamnacagvbcmtcact

SEQ ID NO: 1209 - DNA, 24 bp, Artificial Sequence
  Description of Artificial Sequence: Synthetic oligonucleotide
atgcaggcactcsrmvbcmtcact

SEQ ID NO: 1210 - DNA, 24 bp, Artificial Sequence
  Description of Artificial Sequence: Synthetic oligonucleotide
  modified_base (8)..(8): a, c, t or g
dtscagvnactccagactmtcact

SEQ ID NO: 1211 - DNA, 24 bp, Artificial Sequence
  Description of Artificial Sequence: Synthetic oligonucleotide
  modified_base (11)..(11): a, c, t or g
dtscaggcamnacagactmtcact

SEQ ID NO: 1212 - DNA, 24 bp, Artificial Sequence
  Description of Artificial Sequence: Synthetic oligonucleotide
dtscaggcactcsrmactmtcact

SEQ ID NO: 1213 - DNA, 24 bp, Artificial Sequence
  Description of Artificial Sequence: Synthetic oligonucleotide
dtscaggcactccagvbcmtcact

SEQ ID NO: 1214 - DNA, 24 bp, Artificial Sequence
  Description of Artificial Sequence: Synthetic oligonucleotide
  modified_base (8)..(8): a, c, t or g
atgswmvnactccagactmtcact

SEQ ID NO: 1215 - DNA, 24 bp, Artificial Sequence
  Description of Artificial Sequence: Synthetic oligonucleotide
  modified_base (11)..(11): a, c, t or g
atgswmgcamnacagactmtcact

SEQ ID NO: 1216 - DNA, 24 bp, Artificial Sequence
  Description of Artificial Sequence: Synthetic oligonucleotide
atgswmgcactcsrmactmtcact

SEQ ID NO: 1217 - DNA, 24 bp, Artificial Sequence
  Description of Artificial Sequence: Synthetic oligonucleotide
atgswmgcactccagvbcmtcact

SEQ ID NO: 1218 - DNA, 24 bp, Artificial Sequence
  Description of Artificial Sequence: Synthetic oligonucleotide
dtsswmgcactccagactwggact

SEQ ID NO: 1219 - DNA, 24 bp, Artificial Sequence
  Description of Artificial Sequence: Synthetic oligonucleotide
  modified_base (8)..(8): a, c, t or g
  modified_base (11)..(11): a, c, t or g
atgcagvnamnacagactwggact

SEQ ID NO: 1220 - DNA, 24 bp, Artificial Sequence
  Description of Artificial Sequence: Synthetic oligonucleotide
  modified_base (8)..(8): a, c, t or g
atgcagvnactcsrmactwggact

SEQ ID NO: 1221 - DNA, 24 bp, Artificial Sequence
  Description of Artificial Sequence: Synthetic oligonucleotide
  modified_base (8)..(8): a, c, t or g
atgcagvnactccagvbcwggact

SEQ ID NO: 1222 - DNA, 24 bp, Artificial Sequence
  Description of Artificial Sequence: Synthetic oligonucleotide
  modified_base (11)..(11): a, c, t or g
atgcaggcamnasrmactwggact

SEQ ID NO: 1223 - DNA, 24 bp, Artificial Sequence
  Description of Artificial Sequence: Synthetic oligonucleotide
  modified_base (11)..(11): a, c, t or g
atgcaggcamnacagvbcwggact

SEQ ID NO: 1224 - DNA, 24 bp, Artificial Sequence
  Description of Artificial Sequence: Synthetic oligonucleotide
atgcaggcactcsrmvbcwggact

SEQ ID NO: 1225 - DNA, 24 bp, Artificial Sequence
  Description of Artificial Sequence: Synthetic oligonucleotide
  modified_base (8)..(8): a, c, t or g
dtscagvnactccagactwggact

SEQ ID NO: 1226 - DNA, 24 bp, Artificial Sequence
  Description of Artificial Sequence: Synthetic oligonucleotide
  modified_base (11)..(11): a, c, t or g
dtscaggcamnacagactwggact

SEQ ID NO: 1227 - DNA, 24 bp, Artificial Sequence
  Description of Artificial Sequence: Synthetic oligonucleotide
dtscaggcactcsrmactwggact

SEQ ID NO: 1228 - DNA, 24 bp, Artificial Sequence
  Description of Artificial Sequence: Synthetic oligonucleotide
dtscaggcactccagvbcwggact

SEQ ID NO: 1229 - DNA, 24 bp, Artificial Sequence
  Description of Artificial Sequence: Synthetic oligonucleotide
  modified_base (8)..(8): a, c, t or g
atgswmvnactccagactwggact

SEQ ID NO: 1230 - DNA, 24 bp, Artificial Sequence
  Description of Artificial Sequence: Synthetic oligonucleotide
  modified_base (11)..(11): a, c, t or g
atgswmgcamnacagactwggact

SEQ ID NO: 1231 - DNA, 24 bp, Artificial Sequence
  Description of Artificial Sequence: Synthetic oligonucleotide
atgswmgcactcsrmactwggact

SEQ ID NO: 1232 - DNA, 24 bp, Artificial Sequence
  Description of Artificial Sequence: Synthetic oligonucleotide
atgswmgcactccagvbcwggact

SEQ ID NO: 1233 - DNA, 24 bp, Artificial Sequence
  Description of Artificial Sequence: Synthetic oligonucleotide
dtsswmgcactccagactcctact

SEQ ID NO: 1234 - DNA, 24 bp, Artificial Sequence
  Description of Artificial Sequence: Synthetic oligonucleotide
  modified_base (8)..(8): a, c, t or g
  modified_base (11)..(11): a, c, t or g
atgcagvnamnacagactcctact

SEQ ID NO: 1235 - DNA, 24 bp, Artificial Sequence
  Description of Artificial Sequence: Synthetic oligonucleotide
  modified_base (8)..(8): a, c, t or g
atgcagvnactcsrmactcctact

SEQ ID NO: 1236 - DNA, 24 bp, Artificial Sequence
  Description of Artificial Sequence: Synthetic oligonucleotide
  modified_base (8)..(8): a, c, t or g
atgcagvnactccagvbccctact

SEQ ID NO: 1237 - DNA, 24 bp, Artificial Sequence
  Description of Artificial Sequence: Synthetic oligonucleotide
  modified_base (11)..(11): a, c, t or g
atgcaggcamnasrmactcctact

SEQ ID NO: 1238 - DNA, 24 bp, Artificial Sequence
  Description of Artificial Sequence: Synthetic oligonucleotide
  modified_base (11)..(11): a, c, t or g
atgcaggcamnacagvbccctact

SEQ ID NO: 1239 - DNA, 24 bp, Artificial Sequence
  Description of Artificial Sequence: Synthetic oligonucleotide
atgcaggcactcsrmvbccctact

SEQ ID NO: 1240 - DNA, 24 bp, Artificial Sequence
  Description of Artificial Sequence: Synthetic oligonucleotide
  modified_base (8)..(8): a, c, t or g
dtscagvnactccagactcctact

SEQ ID NO: 1241 - DNA, 24 bp, Artificial Sequence
  Description of Artificial Sequence: Synthetic oligonucleotide
  modified_base (11)..(11): a, c, t or g
dtscaggcamnacagactcctact

SEQ ID NO: 1242 - DNA, 24 bp, Artificial Sequence
  Description of Artificial Sequence: Synthetic oligonucleotide
dtscaggcactcsrmactcctact

SEQ ID NO: 1243 - DNA, 24 bp, Artificial Sequence
  Description of Artificial Sequence: Synthetic oligonucleotide
dtscaggcactccagvbccctact

SEQ ID NO: 1244 - DNA, 24 bp, Artificial Sequence
  Description of Artificial Sequence: Synthetic oligonucleotide
  modified_base (8)..(8): a, c, t or g
atgswmvnactccagactcctact

SEQ ID NO: 1245 - DNA, 24 bp, Artificial Sequence
  Description of Artificial Sequence: Synthetic oligonucleotide
  modified_base (11)..(11): a, c, t or g
atgswmgcamnacagactcctact

SEQ ID NO: 1246 - DNA, 24 bp, Artificial Sequence
  Description of Artificial Sequence: Synthetic oligonucleotide
atgswmgcactcsrmactcctact

SEQ ID NO: 1247 - DNA, 24 bp, Artificial Sequence
  Description of Artificial Sequence: Synthetic oligonucleotide
atgswmgcactccagvbccctact

SEQ ID NO: 1248 - DNA, 24 bp, Artificial Sequence
  Description of Artificial Sequence: Synthetic oligonucleotide
swmswmagaagtaattggtwcact

SEQ ID NO: 1249 - DNA, 24 bp, Artificial Sequence
  Description of Artificial Sequence: Synthetic oligonucleotide
  modified_base (10)..(10): a, c, t or g
cagcagbhcnhcaattggtwcact

SEQ ID NO: 1250 - DNA, 24 bp, Artificial Sequence
  Description of Artificial Sequence: Synthetic oligonucleotide
  modified_base (13)..(13): a, c, t or g
cagcagbhcagtnhctggtwcact

SEQ ID NO: 1251 - DNA, 24 bp, Artificial Sequence
  Description of Artificial Sequence: Synthetic oligonucleotide
cagcagbhcagtaatywctwcact

SEQ ID NO: 1252 - DNA, 24 bp, Artificial Sequence
  Description of Artificial Sequence: Synthetic oligonucleotide
  modified_base (10)..(10): a, c, t or g
  modified_base (13)..(13): a, c, t or g
cagcagaganhcnhctggtwcact

SEQ ID NO: 1253 - DNA, 24 bp, Artificial Sequence
  Description of Artificial Sequence: Synthetic oligonucleotide
  modified_base (10)..(10): a, c, t or g
cagcagaganhcaatywctwcact

SEQ ID NO: 1254 - DNA, 24 bp, Artificial Sequence
  Description of Artificial Sequence: Synthetic oligonucleotide
  modified_base (13)..(13): a, c, t or g
cagcagagaagtnhcywctwcact

SEQ ID NO: 1255 - DNA, 24 bp, Artificial Sequence
  Description of Artificial Sequence: Synthetic oligonucleotide
swmcagbhcagtaattggtwcact

SEQ ID NO: 1256 - DNA, 24 bp, Artificial Sequence
  Description of Artificial Sequence: Synthetic oligonucleotide
  modified_base (10)..(10): a, c, t or g
swmcagaganhcaattggtwcact

SEQ ID NO: 1257 - DNA, 24 bp, Artificial Sequence
  Description of Artificial Sequence: Synthetic oligonucleotide
  modified_base (13)..(13): a, c, t or g
swmcagagaagtnhctggtwcact

SEQ ID NO: 1258 - DNA, 24 bp, Artificial Sequence
  Description of Artificial Sequence: Synthetic oligonucleotide
swmcagagaagtaatywctwcact

SEQ ID NO: 1259 - DNA, 24 bp, Artificial Sequence
  Description of Artificial Sequence: Synthetic oligonucleotide
cagswmbhcagtaattggtwcact

SEQ ID NO: 1260 - DNA, 24 bp, Artificial Sequence
  Description of Artificial Sequence: Synthetic oligonucleotide
  modified_base (10)..(10): a, c, t or g
cagswmaganhcaattggtwcact

SEQ ID NO: 1261 - DNA, 24 bp, Artificial Sequence
  Description of Artificial Sequence: Synthetic oligonucleotide
  modified_base (13)..(13): a, c, t or g
cagswmagaagtnhctggtwcact

SEQ ID NO: 1262 - DNA, 24 bp, Artificial Sequence
  Description of Artificial Sequence: Synthetic oligonucleotide
cagswmagaagtaatywctwcact

SEQ ID NO: 1263 - DNA, 24 bp, Artificial Sequence
  Description of Artificial Sequence: Synthetic oligonucleotide
swmswmagaagtaattggmtcact

SEQ ID NO: 1264 - DNA, 24 bp, Artificial Sequence
  Description of Artificial Sequence: Synthetic oligonucleotide
  modified_base (10)..(10): a, c, t or g
cagcagbhcnhcaattggmtcact

SEQ ID NO: 1265 - DNA, 24 bp, Artificial Sequence
  Description of Artificial Sequence: Synthetic oligonucleotide
  modified_base (13)..(13): a, c, t or g
cagcagbhcagtnhctggmtcact

SEQ ID NO: 1266 - DNA, 24 bp, Artificial Sequence
  Description of Artificial Sequence: Synthetic oligonucleotide
cagcagbhcagtaatywcmtcact

SEQ ID NO: 1267 - DNA, 24 bp, Artificial Sequence
  Description of Artificial Sequence: Synthetic oligonucleotide
  modified_base (10)..(10): a, c, t or g
  modified_base (13)..(13): a, c, t or g
cagcagaganhcnhctggmtcact

SEQ ID NO: 1268 - DNA, 24 bp, Artificial Sequence
  Description of Artificial Sequence: Synthetic oligonucleotide
  modified_base (10)..(10): a, c, t or g
cagcagaganhcaatywcmtcact

SEQ ID NO: 1269 - DNA, 24 bp, Artificial Sequence
  Description of Artificial Sequence: Synthetic oligonucleotide
  modified_base (13)..(13): a, c, t or g
cagcagagaagtnhcywcmtcact

SEQ ID NO: 1270 - DNA, 24 bp, Artificial Sequence
  Description of Artificial Sequence: Synthetic oligonucleotide
swmcagbhcagtaattggmtcact

SEQ ID NO: 1271 - DNA, 24 bp, Artificial Sequence
  Description of Artificial Sequence: Synthetic oligonucleotide
  modified_base (10)..(10): a, c, t or g
swmcagaganhcaattggmtcact

SEQ ID NO: 1272 - DNA, 24 bp, Artificial Sequence
  Description of Artificial Sequence: Synthetic oligonucleotide
  modified_base (13)..(13): a, c, t or g
swmcagagaagtnhctggmtcact

SEQ ID NO: 1273 - DNA, 24 bp, Artificial Sequence
  Description of Artificial Sequence: Synthetic oligonucleotide
swmcagagaagtaatywcmtcact

SEQ ID NO: 1274 - DNA, 24 bp, Artificial Sequence
  Description of Artificial Sequence: Synthetic oligonucleotide
cagswmbhcagtaattggmtcact

SEQ ID NO: 1275 - DNA, 24 bp, Artificial Sequence
  Description of Artificial Sequence: Synthetic oligonucleotide
  modified_base (10)..(10): a, c, t or g
cagswmaganhcaattggmtcact

SEQ ID NO: 1276 - DNA, 24 bp, Artificial Sequence
  Description of Artificial Sequence: Synthetic oligonucleotide
  modified_base (13)..(13): a, c, t or g
cagswmagaagtnhctggmtcact

SEQ ID NO: 1277 - DNA, 24 bp, Artificial Sequence
  Description of Artificial Sequence: Synthetic oligonucleotide
cagswmagaagtaatywcmtcact

SEQ ID NO: 1278 - DNA, 24 bp, Artificial Sequence
  Description of Artificial Sequence: Synthetic oligonucleotide
swmswmagaagtaattggwggact

SEQ ID NO: 1279 - DNA, 24 bp, Artificial Sequence
  Description of Artificial Sequence: Synthetic oligonucleotide
  modified_base (10)..(10): a, c, t or g
cagcagbhcnhcaattggwggact

SEQ ID NO: 1280 - DNA, 24 bp, Artificial Sequence
  Description of Artificial Sequence: Synthetic oligonucleotide
  modified_base (13)..(13): a, c, t or g
cagcagbhcagtnhctggwggact

SEQ ID NO: 1281 - DNA, 24 bp, Artificial Sequence
  Description of Artificial Sequence: Synthetic oligonucleotide
cagcagbhcagtaatywcwggact

SEQ ID NO: 1282 - DNA, 24 bp, Artificial Sequence
  Description of Artificial Sequence: Synthetic oligonucleotide
  modified_base (10)..(10): a, c, t or g
  modified_base (13)..(13): a, c, t or g
cagcagaganhcnhctggwggact

SEQ ID NO: 1283 - DNA, 24 bp, Artificial Sequence
  Description of Artificial Sequence: Synthetic oligonucleotide
  modified_base (10)..(10): a, c, t or g
cagcagaganhcaatywcwggact

SEQ ID NO: 1284 - DNA, 24 bp, Artificial Sequence
  Description of Artificial Sequence: Synthetic oligonucleotide
  modified_base (13)..(13): a, c, t or g
cagcagagaagtnhcywcwggact

SEQ ID NO: 1285 - DNA, 24 bp, Artificial Sequence
  Description of Artificial Sequence: Synthetic oligonucleotide
swmcagbhcagtaattggwggact

SEQ ID NO: 1286 - DNA, 24 bp, Artificial Sequence
  Description of Artificial Sequence: Synthetic oligonucleotide
  modified_base (10)..(10): a, c, t or g
swmcagaganhcaattggwggact

SEQ ID NO: 1287 - DNA, 24 bp, Artificial Sequence
  Description of Artificial Sequence: Synthetic oligonucleotide
  modified_base (13)..(13): a, c, t or g
swmcagagaagtnhctggwggact

SEQ ID NO: 1288 - DNA, 24 bp, Artificial Sequence
  Description of Artificial Sequence: Synthetic oligonucleotide
swmcagagaagtaatywcwggact

SEQ ID NO: 1289 - DNA, 24 bp, Artificial Sequence
  Description of Artificial Sequence: Synthetic oligonucleotide
cagswmbhcagtaattggwggact

SEQ ID NO: 1290 - DNA, 24 bp, Artificial Sequence
  Description of Artificial Sequence: Synthetic oligonucleotide
  modified_base (10)..(10): a, c, t or g
cagswmaganhcaattggwggact

SEQ ID NO: 1291 - DNA, 24 bp, Artificial Sequence
  Description of Artificial Sequence: Synthetic oligonucleotide
  modified_base (13)..(13): a, c, t or g
cagswmagaagtnhctggwggact

SEQ ID NO: 1292 - DNA, 24 bp, Artificial Sequence
  Description of Artificial Sequence: Synthetic oligonucleotide
cagswmagaagtaatywcwggact

SEQ ID NO: 1293 - DNA, 24 bp, Artificial Sequence
  Description of Artificial Sequence: Synthetic oligonucleotide
swmswmagaagtaattggcctact

SEQ ID NO: 1294 - DNA, 24 bp, Artificial Sequence
  Description of Artificial Sequence: Synthetic oligonucleotide
  modified_base (10)..(10): a, c, t or g
cagcagbhcnhcaattggcctact

SEQ ID NO: 1295 - DNA, 24 bp, Artificial Sequence
  Description of Artificial Sequence: Synthetic oligonucleotide
  modified_base (13)..(13): a, c, t or g
cagcagbhcagtnhctggcctact

SEQ ID NO: 1296 - DNA, 24 bp, Artificial Sequence
  Description of Artificial Sequence: Synthetic oligonucleotide
cagcagbhcagtaatywccctact

SEQ ID NO: 1297 - DNA, 24 bp, Artificial Sequence
  Description of Artificial Sequence: Synthetic oligonucleotide
  modified_base (10)..(10): a, c, t or g
  modified_base (13)..(13): a, c, t or g
cagcagaganhcnhctggcctact

SEQ ID NO: 1298 - DNA, 24 bp, Artificial Sequence
  Description of Artificial Sequence: Synthetic oligonucleotide
  modified_base (10)..(10): a, c, t or g
cagcagaganhcaatywccctact

SEQ ID NO: 1299 - DNA, 24 bp, Artificial Sequence
  Description of Artificial Sequence: Synthetic oligonucleotide
  modified_base (13)..(13): a, c, t or g
cagcagagaagtnhcywccctact

SEQ ID NO: 1300 - DNA, 24 bp, Artificial Sequence
  Description of Artificial Sequence: Synthetic oligonucleotide
swmcagbhcagtaattggcctact

SEQ ID NO: 1301 - DNA, 24 bp, Artificial Sequence
  Description of Artificial Sequence: Synthetic oligonucleotide
  modified_base (10)..(10): a, c, t or g
swmcagaganhcaattggcctact

SEQ ID NO: 1302 - DNA, 24 bp, Artificial Sequence
  Description of Artificial Sequence: Synthetic oligonucleotide
  modified_base (13)..(13): a, c, t or g
swmcagagaagtnhctggcctact

SEQ ID NO: 1303 - DNA, 24 bp, Artificial Sequence
  Description of Artificial Sequence: Synthetic oligonucleotide
swmcagagaagtaatywccctact

SEQ ID NO: 1304 - DNA, 24 bp, Artificial Sequence
  Description of Artificial Sequence: Synthetic oligonucleotide
cagswmbhcagtaattggcctact

SEQ ID NO: 1305 - DNA, 24 bp, Artificial Sequence
  Description of Artificial Sequence: Synthetic oligonucleotide
  modified_base (10)..(10): a, c, t or g
cagswmaganhcaattggcctact

SEQ ID NO: 1306 - DNA, 24 bp, Artificial Sequence
  Description of Artificial Sequence: Synthetic oligonucleotide
  modified_base (13)..(13): a, c, t or g
cagswmagaagtnhctggcctact

SEQ ID NO: 1307 - DNA, 24 bp, Artificial Sequence
  Description of Artificial Sequence: Synthetic oligonucleotide
cagswmagaagtaatywccctact

SEQ ID NO: 1308 - DNA, 24 bp, Artificial Sequence
  Description of Artificial Sequence: Synthetic oligonucleotide
swmswmtacaataattggtwcact

SEQ ID NO: 1309 - DNA, 24 bp, Artificial Sequence
  Description of Artificial Sequence: Synthetic oligonucleotide
  modified_base (13)..(13): a, c, t or g
cagcagbhcaatnhctggtwcact

SEQ ID NO: 1310 - DNA, 24 bp, Artificial Sequence
  Description of Artificial Sequence: Synthetic oligonucleotide
cagcagbhcaataatywctwcact

SEQ ID NO: 1311 - DNA, 24 bp, Artificial Sequence
  Description of Artificial Sequence: Synthetic oligonucleotide
  modified_base (10)..(10): a, c, t or g
  modified_base (13)..(13): a, c, t or g
cagcagtacnhcnhctggtwcact

SEQ ID NO: 1312 - DNA, 24 bp, Artificial Sequence
  Description of Artificial Sequence: Synthetic oligonucleotide
  modified_base (13)..(13): a, c, t or g
cagcagtacaatnhcywctwcact

SEQ ID NO: 1313 - DNA, 24 bp, Artificial Sequence
  Description of Artificial Sequence: Synthetic oligonucleotide
swmcagbhcaataattggtwcact

SEQ ID NO: 1314 - DNA, 24 bp, Artificial Sequence
  Description of Artificial Sequence: Synthetic oligonucleotide
  modified_base (10)..(10): a, c, t or g
swmcagtacnhcaattggtwcact

SEQ ID NO: 1315 - DNA, 24 bp, Artificial Sequence
  Description of Artificial Sequence: Synthetic oligonucleotide
  modified_base (13)..(13): a, c, t or g
swmcagtacaatnhctggtwcact

SEQ ID NO: 1316 - DNA, 24 bp, Artificial Sequence
  Description of Artificial Sequence: Synthetic oligonucleotide
swmcagtacaataatywctwcact

SEQ ID NO: 1317 - DNA, 24 bp, Artificial Sequence
  Description of Artificial Sequence: Synthetic oligonucleotide
cagswmbhcaataattggtwcact

SEQ ID NO: 1318 - DNA, 24 bp, Artificial Sequence
  Description of Artificial Sequence: Synthetic oligonucleotide
  modified_base (10)..(10): a, c, t or g
cagswmtacnhcaattggtwcact

SEQ ID NO: 1319 - DNA, 24 bp, Artificial Sequence
  Description of Artificial Sequence: Synthetic oligonucleotide
  modified_base (13)..(13): a, c, t or g
cagswmtacaatnhctggtwcact

SEQ ID NO: 1320 - DNA, 24 bp, Artificial Sequence
  Description of Artificial Sequence: Synthetic oligonucleotide
cagswmtacaataatywctwcact

SEQ ID NO: 1321 - DNA, 24 bp, Artificial Sequence
  Description of Artificial Sequence: Synthetic oligonucleotide
swmswmtacaataattggmtcact

SEQ ID NO: 1322 - DNA, 24 bp, Artificial Sequence
  Description of Artificial Sequence: Synthetic oligonucleotide
  modified_base (13)..(13): a, c, t or g
cagcagbhcaatnhctggmtcact

SEQ ID NO: 1323 - DNA, 24 bp, Artificial Sequence
  Description of Artificial Sequence: Synthetic oligonucleotide
cagcagbhcaataatywcmtcact

SEQ ID NO: 1324 - DNA, 24 bp, Artificial Sequence
  Description of Artificial Sequence: Synthetic oligonucleotide
  modified_base (10)..(10): a, c, t or g
  modified_base (13)..(13): a, c, t or g
cagcagtacnhcnhctggmtcact

SEQ ID NO: 1325 - DNA, 24 bp, Artificial Sequence
  Description of Artificial Sequence: Synthetic oligonucleotide
  modified_base (13)..(13): a, c, t or g
cagcagtacaatnhcywcmtcact

SEQ ID NO: 1326 - DNA, 24 bp, Artificial Sequence
  Description of Artificial Sequence: Synthetic oligonucleotide
swmcagbhcaataattggmtcact

SEQ ID NO: 1327 - DNA, 24 bp, Artificial Sequence
  Description of Artificial Sequence: Synthetic oligonucleotide
  modified_base (10)..(10): a, c, t or g
swmcagtacnhcaattggmtcact

SEQ ID NO: 1328 - DNA, 24 bp, Artificial Sequence
  Description of Artificial Sequence: Synthetic oligonucleotide
  modified_base (13)..(13): a, c, t or g
swmcagtacaatnhctggmtcact

SEQ ID NO: 1329 - DNA, 24 bp, Artificial Sequence
  Description of Artificial Sequence: Synthetic oligonucleotide
swmcagtacaataatywcmtcact

SEQ ID NO: 1330 - DNA, 24 bp, Artificial Sequence
  Description of Artificial Sequence: Synthetic oligonucleotide
cagswmbhcaataattggmtcact

SEQ ID NO: 1331 - DNA, 24 bp, Artificial Sequence
  Description of Artificial Sequence: Synthetic oligonucleotide
  modified_base (10)..(10): a, c, t or g
cagswmtacnhcaattggmtcact

SEQ ID NO: 1332 - DNA, 24 bp, Artificial Sequence
  Description of Artificial Sequence: Synthetic oligonucleotide
  modified_base (13)..(13): a, c, t or g
cagswmtacaatnhctggmtcact

SEQ ID NO: 1333 - DNA, 24 bp, Artificial Sequence
  Description of Artificial Sequence: Synthetic oligonucleotide
cagswmtacaataatywcmtcact

SEQ ID NO: 1334 - DNA, 24 bp, Artificial Sequence
  Description of Artificial Sequence: Synthetic oligonucleotide
swmswmtacaataattggwggact

SEQ ID NO: 1335 - DNA, 24 bp, Artificial Sequence
  Description of Artificial Sequence: Synthetic oligonucleotide
  modified_base (13)..(13): a, c, t or g
cagcagbhcaatnhctggwggact

SEQ ID NO: 1336 - DNA, 24 bp, Artificial Sequence
  Description of Artificial Sequence: Synthetic oligonucleotide
cagcagbhcaataatywcwggact

SEQ ID NO: 1337 - DNA, 24 bp, Artificial Sequence
  Description of Artificial Sequence: Synthetic oligonucleotide
  modified_base (10)..(10): a, c, t or g
  modified_base (13)..(13): a, c, t or g
cagcagtacnhcnhctggwggact

SEQ ID NO: 1338 - DNA, 24 bp, Artificial Sequence
  Description of Artificial Sequence: Synthetic oligonucleotide
  modified_base (13)..(13): a, c, t or g
cagcagtacaatnhcywcwggact

SEQ ID NO: 1339 - DNA, 24 bp, Artificial Sequence
  Description of Artificial Sequence: Synthetic oligonucleotide
swmcagbhcaataattggwggact

SEQ ID NO: 1340 - DNA, 24 bp, Artificial Sequence
  Description of Artificial Sequence: Synthetic oligonucleotide
  modified_base (10)..(10): a, c, t or g
swmcagtacnhcaattggwggact

SEQ ID NO: 1341 - DNA, 24 bp, Artificial Sequence
  Description of Artificial Sequence: Synthetic oligonucleotide
  modified_base (13)..(13): a, c, t or g
swmcagtacaatnhctggwggact

SEQ ID NO: 1342 - DNA, 24 bp, Artificial Sequence
  Description of Artificial Sequence: Synthetic oligonucleotide
swmcagtacaataatywcwggact

SEQ ID NO: 1343 - DNA, 24 bp, Artificial Sequence
  Description of Artificial Sequence: Synthetic oligonucleotide
cagswmbhcaataattggwggact

SEQ ID NO: 1344 - DNA, 24 bp, Artificial Sequence
  Description of Artificial Sequence: Synthetic oligonucleotide
  modified_base (10)..(10): a, c, t or g
cagswmtacnhcaattggwggact

SEQ ID NO: 1345 - DNA, 24 bp, Artificial Sequence
  Description of Artificial Sequence: Synthetic oligonucleotide
  modified_base (13)..(13): a, c, t or g
cagswmtacaatnhctggwggact

SEQ ID NO: 1346 - DNA, 24 bp, Artificial Sequence
  Description of Artificial Sequence: Synthetic oligonucleotide
cagswmtacaataatywcwggact

SEQ ID NO: 1347 - DNA, 24 bp, Artificial Sequence
  Description of Artificial Sequence: Synthetic oligonucleotide
swmswmtacaataattggcctact

SEQ ID NO: 1348 - DNA, 24 bp, Artificial Sequence
  Description of Artificial Sequence: Synthetic oligonucleotide
  modified_base (13)..(13): a, c, t or g
cagcagbhcaatnhctggcctact

SEQ ID NO: 1349 - DNA, 24 bp, Artificial Sequence
  Description of Artificial Sequence: Synthetic oligonucleotide
cagcagbhcaataatywccctact

SEQ ID NO: 1350 - DNA, 24 bp, Artificial Sequence
  Description of Artificial Sequence: Synthetic oligonucleotide
  modified_base (10)..(10): a, c, t or g
  modified_base (13)..(13): a, c, t or g
cagcagtacnhcnhctggcctact

SEQ ID NO: 1351 - DNA, 24 bp, Artificial Sequence
  Description of Artificial Sequence: Synthetic oligonucleotide
  modified_base (13)..(13): a, c, t or g
cagcagtacaatnhcywccctact

SEQ ID NO: 1352 - DNA, 24 bp, Artificial Sequence
  Description of Artificial Sequence: Synthetic oligonucleotide
swmcagbhcaataattggcctact

SEQ ID NO: 1353 - DNA, 24 bp, Artificial Sequence
  Description of Artificial Sequence: Synthetic oligonucleotide
  modified_base (10)..(10): a, c, t or g
swmcagtacnhcaattggcctact

SEQ ID NO: 1354 - DNA, 24 bp, Artificial Sequence
  Description of Artificial Sequence: Synthetic oligonucleotide
  modified_base (13)..(13): a, c, t or g
swmcagtacaatnhctggcctact

SEQ ID NO: 1355 - DNA, 24 bp, Artificial Sequence
  Description of Artificial Sequence: Synthetic oligonucleotide
swmcagtacaataatywccctact

SEQ ID NO: 1356 - DNA, 24 bp, Artificial Sequence
  Description of Artificial Sequence: Synthetic oligonucleotide
cagswmbhcaataattggcctact

SEQ ID NO: 1357 - DNA, 24 bp, Artificial Sequence
  Description of Artificial Sequence: Synthetic oligonucleotide
  modified_base (10)..(10): a, c, t or g
cagswmtacnhcaattggcctact

SEQ ID NO: 1358 - DNA, 24 bp, Artificial Sequence
  Description of Artificial Sequence: Synthetic oligonucleotide
  modified_base (13)..(13): a, c, t or g
cagswmtacaatnhctggcctact

SEQ ID NO: 1359 - DNA, 24 bp, Artificial Sequence
  Description of Artificial Sequence: Synthetic oligonucleotide
cagswmtacaataatywccctact

SEQ ID NO: 1360 - DNA, 24 bp, Artificial Sequence
  Description of Artificial Sequence: Synthetic oligonucleotide
swmswmtacggaagtagttwcact

SEQ ID NO: 1361 - DNA, 24 bp, Artificial Sequence
  Description of Artificial Sequence: Synthetic oligonucleotide
cagcagbhcbhcagtagttwcact

SEQ ID NO: 1362 - DNA, 24 bp, Artificial Sequence
  Description of Artificial Sequence: Synthetic oligonucleotide
  modified_base (14)..(14): a, c, t or g
cagcagbhcggavncagttwcact

SEQ ID NO: 1363 - DNA, 24 bp, Artificial Sequence
  Description of Artificial Sequence: Synthetic oligonucleotide
cagcagbhcggaagtbhctwcact

SEQ ID NO: 1364 - DNA, 24 bp, Artificial Sequence
  Description of Artificial Sequence: Synthetic oligonucleotide
  modified_base (14)..(14): a, c, t or g
cagcagtacbhcvncagttwcact

SEQ ID NO: 1365 - DNA, 24 bp, Artificial Sequence
  Description of Artificial Sequence: Synthetic oligonucleotide
cagcagtacbhcagtbhctwcact

SEQ ID NO: 1366 - DNA, 24 bp, Artificial Sequence
  Description of Artificial Sequence: Synthetic oligonucleotide
  modified_base (14)..(14): a, c, t or g
cagcagtacggavncbhctwcact

SEQ ID NO: 1367 - DNA, 24 bp, Artificial Sequence
  Description of Artificial Sequence: Synthetic oligonucleotide
swmcagbhcggaagtagttwcact

SEQ ID NO: 1368 - DNA, 24 bp, Artificial Sequence
  Description of Artificial Sequence: Synthetic oligonucleotide
swmcagtacbhcagtagttwcact

SEQ ID NO: 1369 - DNA, 24 bp, Artificial Sequence
  Description of Artificial Sequence: Synthetic oligonucleotide
  modified_base (14)..(14): a, c, t or g
swmcagtacggavncagttwcact

SEQ ID NO: 1370 - DNA, 24 bp, Artificial Sequence
  Description of Artificial Sequence: Synthetic oligonucleotide
swmcagtacggaagtbhctwcact

SEQ ID NO: 1371 - DNA, 24 bp, Artificial Sequence
  Description of Artificial Sequence: Synthetic oligonucleotide
cagswmbhcggaagtagttwcact

SEQ ID NO: 1372 - DNA, 24 bp, Artificial Sequence
  Description of Artificial Sequence: Synthetic oligonucleotide
cagswmtacbhcagtagttwcact

SEQ ID NO: 1373 - DNA, 24 bp, Artificial Sequence
  Description of Artificial Sequence: Synthetic oligonucleotide
  modified_base (14)..(14): a, c, t or g
cagswmtacggavncagttwcact

SEQ ID NO: 1374 - DNA, 24 bp, Artificial Sequence
  Description of Artificial Sequence: Synthetic oligonucleotide
cagswmtacggaagtbhctwcact

SEQ ID NO: 1375 - DNA, 24 bp, Artificial Sequence
  Description of Artificial Sequence: Synthetic oligonucleotide
swmswmtacggaagtagtmtcact

SEQ ID NO: 1376 - DNA, 24 bp, Artificial Sequence
  Description of Artificial Sequence: Synthetic oligonucleotide
cagcagbhcbhcagtagtmtcact

SEQ ID NO: 1377 - DNA, 24 bp, Artificial Sequence
  Description of Artificial Sequence: Synthetic oligonucleotide
  modified_base (14)..(14): a, c, t or g
cagcagbhcggavncagtmtcact

SEQ ID NO: 1378 - DNA, 24 bp, Artificial Sequence
  Description of Artificial Sequence: Synthetic oligonucleotide
cagcagbhcggaagtbhcmtcact

SEQ ID NO: 1379 - DNA, 24 bp, Artificial Sequence
  Description of Artificial Sequence: Synthetic oligonucleotide
  modified_base (14)..(14): a, c, t or g
cagcagtacbhcvncagtmtcact

SEQ ID NO: 1380 - DNA, 24 bp, Artificial Sequence
  Description of Artificial Sequence: Synthetic oligonucleotide
cagcagtacbhcagtbhcmtcact

SEQ ID NO: 1381 - DNA, 24 bp, Artificial Sequence
  Description of Artificial Sequence: Synthetic oligonucleotide
  modified_base (14)..(14): a, c, t or g
cagcagtacggavncbhcmtcact

SEQ ID NO: 1382 - DNA, 24 bp, Artificial Sequence
  Description of Artificial Sequence: Synthetic oligonucleotide
swmcagbhcggaagtagtmtcact

SEQ ID NO: 1383 - DNA, 24 bp, Artificial Sequence
  Description of Artificial Sequence: Synthetic oligonucleotide
swmcagtacbhcagtagtmtcact

SEQ ID NO: 1384 - DNA, 24 bp, Artificial Sequence
  Description of Artificial Sequence: Synthetic oligonucleotide
  modified_base (14)..(14): a, c, t or g
swmcagtacggavncagtmtcact

SEQ ID NO: 1385 - DNA, 24 bp, Artificial Sequence
  Description of Artificial Sequence: Synthetic oligonucleotide
swmcagtacggaagtbhcmtcact

SEQ ID NO: 1386 - DNA, 24 bp, Artificial Sequence
  Description of Artificial Sequence: Synthetic oligonucleotide
cagswmbhcggaagtagtmtcact

SEQ ID NO: 1387 - DNA, 24 bp, Artificial Sequence
  Description of Artificial Sequence: Synthetic oligonucleotide
cagswmtacbhcagtagtmtcact

SEQ ID NO: 1388 - DNA, 24 bp, Artificial Sequence
  Description of Artificial Sequence: Synthetic oligonucleotide
  modified_base (14)..(14): a, c, t or g
cagswmtacggavncagtmtcact

SEQ ID NO: 1389 - DNA, 24 bp, Artificial Sequence
  Description of Artificial Sequence: Synthetic oligonucleotide
cagswmtacggaagtbhcmtcact

SEQ ID NO: 1390 - DNA, 24 bp, Artificial Sequence
  Description of Artificial Sequence: Synthetic oligonucleotide
swmswmtacggaagtagtwggact

SEQ ID NO: 1391 - DNA, 24 bp, Artificial Sequence
  Description of Artificial Sequence: Synthetic oligonucleotide
cagcagbhcbhcagtagtwggact

SEQ ID NO: 1392 - DNA, 24 bp, Artificial Sequence
  Description of Artificial Sequence: Synthetic oligonucleotide
  modified_base (14)..(14): a, c, t or g
cagcagbhcggavncagtwggact

SEQ ID NO: 1393 - DNA, 24 bp, Artificial Sequence
  Description of Artificial Sequence: Synthetic oligonucleotide
cagcagbhcggaagtbhcwggact

SEQ ID NO: 1394 - DNA, 24 bp, Artificial Sequence
  Description of Artificial Sequence: Synthetic oligonucleotide
  modified_base (14)..(14): a, c, t or g
cagcagtacbhcvncagtwggact

SEQ ID NO: 1395 - DNA, 24 bp, Artificial Sequence
  Description of Artificial Sequence: Synthetic oligonucleotide
cagcagtacbhcagtbhcwggact

SEQ ID NO: 1396 - DNA, 24 bp, Artificial Sequence
  Description of Artificial Sequence: Synthetic oligonucleotide
  modified_base (14)..(14): a, c, t or g
cagcagtacggavncbhcwggact

SEQ ID NO: 1397 - DNA, 24 bp, Artificial Sequence
  Description of Artificial Sequence: Synthetic oligonucleotide
swmcagbhcggaagtagtwggact

SEQ ID NO: 1398 - DNA, 24 bp, Artificial Sequence
  Description of Artificial Sequence: Synthetic oligonucleotide
swmcagtacbhcagtagtwggact

SEQ ID NO: 1399 - DNA, 24 bp, Artificial Sequence
  Description of Artificial Sequence: Synthetic oligonucleotide
  modified_base (14)..(14): a, c, t or g
swmcagtacggavncagtwggact

SEQ ID NO: 1400 - DNA, 24 bp, Artificial Sequence
  Description of Artificial Sequence: Synthetic oligonucleotide
swmcagtacggaagtbhcwggact

SEQ ID NO: 1401 - DNA, 24 bp, Artificial Sequence
  Description of Artificial Sequence: Synthetic oligonucleotide
cagswmbhcggaagtagtwggact

SEQ ID NO: 1402 - DNA, 24 bp, Artificial Sequence
  Description of Artificial Sequence: Synthetic oligonucleotide
cagswmtacbhcagtagtwggact

SEQ ID NO: 1403 - DNA, 24 bp, Artificial Sequence
  Description of Artificial Sequence: Synthetic oligonucleotide
  modified_base (14)..(14): a, c, t or g
cagswmtacggavncagtwggact

SEQ ID NO: 1404 - DNA, 24 bp, Artificial Sequence
  Description of Artificial Sequence: Synthetic oligonucleotide
cagswmtacggaagtbhcwggact

SEQ ID NO: 1405 - DNA, 24 bp, Artificial Sequence
  Description of Artificial Sequence: Synthetic oligonucleotide
swmswmtacggaagtagtcctact

SEQ ID NO: 1406 - DNA, 24 bp, Artificial Sequence
  Description of Artificial Sequence: Synthetic oligonucleotide
cagcagbhcbhcagtagtcctact

SEQ ID NO: 1407 - DNA, 24 bp, Artificial Sequence
  Description of Artificial Sequence: Synthetic oligonucleotide
  modified_base (14)..(14): a, c, t or g
cagcagbhcggavncagtcctact

SEQ ID NO: 1408 - DNA, 24 bp, Artificial Sequence
  Description of Artificial Sequence: Synthetic oligonucleotide
cagcagbhcggaagtbhccctact

SEQ ID NO: 1409 - DNA, 24 bp, Artificial Sequence
  Description of Artificial Sequence: Synthetic oligonucleotide
  modified_base (14)..(14): a, c, t or g
cagcagtacbhcvncagtcctact

SEQ ID NO: 1410 - DNA, 24 bp, Artificial Sequence
  Description of Artificial Sequence: Synthetic oligonucleotide
cagcagtacbhcagtbhccctact

SEQ ID NO: 1411 - DNA, 24 bp, Artificial Sequence
  Description of Artificial Sequence: Synthetic oligonucleotide
  modified_base (14)..(14): a, c, t or g
cagcagtacggavncbhccctact

SEQ ID NO: 1412 - DNA, 24 bp, Artificial Sequence
  Description of Artificial Sequence: Synthetic oligonucleotide
swmcagbhcggaagtagtcctact

SEQ ID NO: 1413 - DNA, 24 bp, Artificial Sequence
  Description of Artificial Sequence: Synthetic oligonucleotide
swmcagtacbhcagtagtcctact

SEQ ID NO: 1414 - DNA, 24 bp, Artificial Sequence
  Description of Artificial Sequence: Synthetic oligonucleotide
  modified_base (14)..(14): a, c, t or g
swmcagtacggavncagtcctact

SEQ ID NO: 1415 - DNA, 24 bp, Artificial Sequence
  Description of Artificial Sequence: Synthetic oligonucleotide
swmcagtacggaagtbhccctact

SEQ ID NO: 1416 - DNA, 24 bp, Artificial Sequence
  Description of Artificial Sequence: Synthetic oligonucleotide
cagswmbhcggaagtagtcctact

SEQ ID NO: 1417 - DNA, 24 bp, Artificial Sequence
  Description of Artificial Sequence: Synthetic oligonucleotide
cagswmtacbhcagtagtcctact

SEQ ID NO: 1418 - DNA, 24 bp, Artificial Sequence
  Description of Artificial Sequence: Synthetic oligonucleotide
  modified_base (14)..(14): a, c, t or g
cagswmtacggavncagtcctact

SEQ ID NO: 1419 - DNA, 24 bp, Artificial Sequence
  Description of Artificial Sequence: Synthetic oligonucleotide
cagswmtacggaagtbhccctact

SEQ ID NO: 1420 - DNA, 24 bp, Artificial Sequence
  Description of Artificial Sequence: Synthetic oligonucleotide
cagcagbhcvrmmbctactwcact

SEQ ID NO: 1421 - DNA, 24 bp, Artificial Sequence
  Description of Artificial Sequence: Synthetic oligonucleotide
cagcagbhcvrmmbctacmtcact

SEQ ID NO: 1422 - DNA, 24 bp, Artificial Sequence
  Description of Artificial Sequence: Synthetic oligonucleotide
cagcagbhcvrmmbctacwggact

SEQ ID NO: 1423 - DNA, 24 bp, Artificial Sequence
  Description of Artificial Sequence: Synthetic oligonucleotide
cagcagbhcvrmmbctacyctact

SEQ ID NO: 1424 - DNA, 24 bp, Artificial Sequence
  Description of Artificial Sequence: Synthetic oligonucleotide
cagcagbhcaatmbcywctwcact

SEQ ID NO: 1425 - DNA, 24 bp, Artificial Sequence
  Description of Artificial Sequence: Synthetic oligonucleotide
cagcagbhcaatmbcywcmtcact

SEQ ID NO: 1426 - DNA, 24 bp, Artificial Sequence
  Description of Artificial Sequence: Synthetic oligonucleotide
cagcagbhcaatmbcywcwggact

SEQ ID NO: 1427 - DNA, 24 bp, Artificial Sequence
  Description of Artificial Sequence: Synthetic oligonucleotide
cagcagbhcaatmbcywcyctact

SEQ ID NO: 1428 - DNA, 24 bp, Artificial Sequence
  Description of Artificial Sequence: Synthetic oligonucleotide
cagcagbhcvrmagtywctwcact

SEQ ID NO: 1429 - DNA, 24 bp, Artificial Sequence
  Description of Artificial Sequence: Synthetic oligonucleotide
cagcagbhcvrmagtywcmtcact

SEQ ID NO: 1430 - DNA, 24 bp, Artificial Sequence
  Description of Artificial Sequence: Synthetic oligonucleotide
cagcagbhcvrmagtywcwggact

SEQ ID NO: 1431 - DNA, 24 bp, Artificial Sequence
  Description of Artificial Sequence: Synthetic oligonucleotide
cagcagbhcvrmagtywcyctact

SEQ ID NO: 1432 - DNA, 24 bp, Artificial Sequence
  Description of Artificial Sequence: Synthetic oligonucleotide
cagcagtacvrmmbcywctwcact

SEQ ID NO: 1433 - DNA, 24 bp, Artificial Sequence
  Description of Artificial Sequence: Synthetic oligonucleotide
cagcagtacvrmmbcywcmtcact

SEQ ID NO: 1434 - DNA, 24 bp, Artificial Sequence
  Description of Artificial Sequence: Synthetic oligonucleotide
cagcagtacvrmmbcywcwggact

SEQ ID NO: 1435 - DNA, 24 bp, Artificial Sequence
  Description of Artificial Sequence: Synthetic oligonucleotide
cagcagtacvrmmbcywcyctact

SEQ ID NO: 1436 - DNA, 24 bp, Artificial Sequence
  Description of Artificial Sequence: Synthetic oligonucleotide
  modified_base (8)..(8): a, c, t or g
  modified_base (10)..(10): a, c, t or g
  modified_base (13)..(13): a, c, t or g
cagcagrnanhcnhcttctwcact

SEQ ID NO: 1437 - DNA, 24 bp, Artificial Sequence
  Description of Artificial Sequence: Synthetic oligonucleotide
  modified_base (8)..(8): a, c, t or g
  modified_base (10)..(10): a, c, t or g
  modified_base (13)..(13): a, c, t or g
cagcagrnanhcnhcttcmtcact

SEQ ID NO: 1438 - DNA, 24 bp, Artificial Sequence
  Description of Artificial Sequence: Synthetic oligonucleotide
  modified_base (8)..(8): a, c, t or g
  modified_base (10)..(10): a, c, t or g
  modified_base (13)..(13): a, c, t or g
cagcagrnanhcnhcttcwggact

SEQ ID NO: 1439 - DNA, 24 bp, Artificial Sequence
  Description of Artificial Sequence: Synthetic oligonucleotide
  modified_base (8)..(8): a, c, t or g
  modified_base (10)..(10): a, c, t or g
  modified_base (13)..(13): a, c, t or g
cagcagrnanhcnhcttccctact

SEQ ID NO: 1440 - DNA, 24 bp, Artificial Sequence
  Description of Artificial Sequence: Synthetic oligonucleotide
  modified_base (8)..(8): a, c, t or g
  modified_base (10)..(10): a, c, t or g
cagcagrnanhcagtywctwcact

SEQ ID NO: 1441 - DNA, 24 bp, Artificial Sequence
  Description of Artificial Sequence: Synthetic oligonucleotide
  modified_base (8)..(8): a, c, t or g
  modified_base (10)..(10): a, c, t or g
cagcagrnanhcagtywcmtcact

SEQ ID NO: 1442 - DNA, 24 bp, Artificial Sequence
  Description of Artificial Sequence: Synthetic oligonucleotide
  modified_base (8)..(8): a, c, t or g
  modified_base (10)..(10): a, c, t or g
cagcagrnanhcagtywcwggact

SEQ ID NO: 1443 - DNA, 24 bp, Artificial Sequence
  Description of Artificial Sequence: Synthetic oligonucleotide
  modified_base (8)..(8): a, c, t or g
  modified_base (10)..(10): a, c, t or g
cagcagrnanhcagtywccctact

SEQ ID NO: 1444 - DNA, 24 bp, Artificial Sequence
  Description of Artificial Sequence: Synthetic oligonucleotide
  modified_base (8)..(8): a, c, t or g
  modified_base (13)..(13): a, c, t or g
cagcagrnaaatnhcywctwcact

SEQ ID NO: 1445 - DNA, 24 bp, Artificial Sequence
  Description of Artificial Sequence: Synthetic oligonucleotide
  modified_base (8)..(8): a, c, t or g
  modified_base (13)..(13): a, c, t or g
cagcagrnaaatnhcywcmtcact

SEQ ID NO: 1446 - DNA, 24 bp, Artificial Sequence
  Description of Artificial Sequence: Synthetic oligonucleotide
  modified_base (8)..(8): a, c, t or g
  modified_base (13)..(13): a, c, t or g
cagcagrnaaatnhcywcwggact

SEQ ID NO: 1447 - DNA, 24 bp, Artificial Sequence
  Description of Artificial Sequence: Synthetic oligonucleotide
  modified_base (8)..(8): a, c, t or g
  modified_base (13)..(13): a, c, t or g
cagcagrnaaatnhcywccctact

SEQ ID NO: 1448 - DNA, 24 bp, Artificial Sequence
  Description of Artificial Sequence: Synthetic oligonucleotide
  modified_base (10)..(10): a, c, t or g
  modified_base (13)..(13): a, c, t or g
cagcaggcanhcnhcywctwcact

SEQ ID NO: 1449 - DNA, 24 bp, Artificial Sequence
  Description of Artificial Sequence: Synthetic oligonucleotide
  modified_base (10)..(10): a, c, t or g
  modified_base (13)..(13): a, c, t or g
cagcaggcanhcnhcywcmtcact

SEQ ID NO: 1450 - DNA, 24 bp, Artificial Sequence
  Description of Artificial Sequence: Synthetic oligonucleotide
  modified_base (10)..(10): a, c, t or g
  modified_base (13)..(13): a, c, t or g
cagcaggcanhcnhcywcwggact

SEQ ID NO: 1451 - DNA, 24 bp, Artificial Sequence
  Description of Artificial Sequence: Synthetic oligonucleotide
  modified_base (10)..(10): a, c, t or g
  modified_base (13)..(13): a, c, t or g
cagcaggcanhcnhcywccctact

SEQ ID NO: 1452 - DNA, 24 bp, Artificial Sequence
  Description of Artificial Sequence: Synthetic oligonucleotide
  modified_base (10)..(10): a, c, t or g
  modified_base (13)..(13): a, c, t or g
cagcagbhcnhcnhcctctwcact

SEQ ID NO: 1453 - DNA, 24 bp, Artificial Sequence
  Description of Artificial Sequence: Synthetic oligonucleotide
  modified_base (10)..(10): a, c, t or g
  modified_base (13)..(13): a, c, t or g
cagcagbhcnhcnhcctcmtcact

SEQ ID NO: 1454 - DNA, 24 bp, Artificial Sequence
  Description of Artificial Sequence: Synthetic oligonucleotide
  modified_base (10)..(10): a, c, t or g
  modified_base (13)..(13): a, c, t or g
cagcagbhcnhcnhcctcwggact

SEQ ID NO: 1455 - DNA, 24 bp, Artificial Sequence
  Description of Artificial Sequence: Synthetic oligonucleotide
  modified_base (10)..(10): a, c, t or g
  modified_base (13)..(13): a, c, t or g
cagcagbhcnhcnhcctccctact

SEQ ID NO: 1456 - DNA, 24 bp, Artificial Sequence
  Description of Artificial Sequence: Synthetic oligonucleotide
  modified_base (10)..(10): a, c, t or g
cagcagbhcnhcaatywctwcact

SEQ ID NO: 1457 - DNA, 24 bp, Artificial Sequence
  Description of Artificial Sequence: Synthetic oligonucleotide
  modified_base (10)..(10): a, c, t or g
cagcagbhcnhcaatywcmtcact

SEQ ID NO: 1458 - DNA, 24 bp, Artificial Sequence
  Description of Artificial Sequence: Synthetic oligonucleotide
  modified_base (10)..(10): a, c, t or g
cagcagbhcnhcaatywcwggact

SEQ ID NO: 1459 - DNA, 24 bp, Artificial Sequence
  Description of Artificial Sequence: Synthetic oligonucleotide
  modified_base (10)..(10): a, c, t or g
cagcagbhcnhcaatywccctact

SEQ ID NO: 1460 - DNA, 24 bp, Artificial Sequence
  Description of Artificial Sequence: Synthetic oligonucleotide
  modified_base (13)..(13): a, c, t or g
cagcagbhcgatnhcywctwcact

SEQ ID NO: 1461 - DNA, 24 bp, Artificial Sequence
  Description of Artificial Sequence: Synthetic oligonucleotide
  modified_base (13)..(13): a, c, t or g
cagcagbhcgatnhcywcmtcact

SEQ ID NO: 1462 - DNA, 24 bp, Artificial Sequence
  Description of Artificial Sequence: Synthetic oligonucleotide
  modified_base (13)..(13): a, c, t or g
cagcagbhcgatnhcywcwggact

SEQ ID NO: 1463 - DNA, 24 bp, Artificial Sequence
  Description of Artificial Sequence: Synthetic oligonucleotide
  modified_base (13)..(13): a, c, t or g
cagcagbhcgatnhcywccctact

SEQ ID NO: 1464 - DNA, 24 bp, Artificial Sequence
  Description of Artificial Sequence: Synthetic oligonucleotide
  modified_base (10)..(10): a, c, t or g
  modified_base (13)..(13): a, c, t or g
cagcagtacnhcnhcywctwcact

SEQ ID NO: 1465 - DNA, 24 bp, Artificial Sequence
  Description of Artificial Sequence: Synthetic oligonucleotide
  modified_base (10)..(10): a, c, t or g
  modified_base (13)..(13): a, c, t or g
cagcagtacnhcnhcywcmtcact

SEQ ID NO: 1466 - DNA, 24 bp, Artificial Sequence
  Description of Artificial Sequence: Synthetic oligonucleotide
  modified_base (10)..(10): a, c, t or g
  modified_base (13)..(13): a, c, t or g
cagcagtacnhcnhcywcwggact

SEQ ID NO: 1467 - DNA, 24 bp, Artificial Sequence
  Description of Artificial Sequence: Synthetic oligonucleotide
  modified_base (10)..(10): a, c, t or g
  modified_base (13)..(13): a, c, t or g
cagcagtacnhcnhcywccctact

SEQ ID NO: 1468 - DNA, 24 bp, Artificial Sequence
  Description of Artificial Sequence: Synthetic oligonucleotide
  modified_base (8)..(8): a, c, t or g
  modified_base (13)..(13): a, c, t or g
cagcaavnabhcnhcacttwcact

SEQ ID NO: 1469 - DNA, 24 bp, Artificial Sequence
  Description of Artificial Sequence: Synthetic oligonucleotide
  modified_base (8)..(8): a, c, t or g
  modified_base (13)..(13): a, c, t or g
cagcaavnabhcnhcactmtcact

SEQ ID NO: 1470 - DNA, 24 bp, Artificial Sequence
  Description of Artificial Sequence: Synthetic oligonucleotide
  modified_base (8)..(8): a, c, t or g
  modified_base (13)..(13): a, c, t or g
cagcaavnabhcnhcactwggact

SEQ ID NO: 1471 - DNA, 24 bp, Artificial Sequence
  Description of Artificial Sequence: Synthetic oligonucleotide
  modified_base (8)..(8): a, c, t or g
  modified_base (13)..(13): a, c, t or g
cagcaavnabhcnhcactcctact

SEQ ID NO: 1472 - DNA, 24 bp, Artificial Sequence
  Description of Artificial Sequence: Synthetic oligonucleotide
  modified_base (8)..(8): a, c, t or g
cagcaavnabhcagtbhctwcact

SEQ ID NO: 1473 - DNA, 24 bp, Artificial Sequence
  Description of Artificial Sequence: Synthetic oligonucleotide
  modified_base (8)..(8): a, c, t or g
cagcaavnabhcagtbhcmtcact

SEQ ID NO: 1474 - DNA, 24 bp, Artificial Sequence
  Description of Artificial Sequence: Synthetic oligonucleotide
  modified_base (8)..(8): a, c, t or g
cagcaavnabhcagtbhcwggact

SEQ ID NO: 1475 - DNA, 24 bp, Artificial Sequence
  Description of Artificial Sequence: Synthetic oligonucleotide
  modified_base (8)..(8): a, c, t or g
cagcaavnabhcagtbhccctact

SEQ ID NO: 1476 - DNA, 24 bp, Artificial Sequence
  Description of Artificial Sequence: Synthetic oligonucleotide
  modified_base (8)..(8): a, c, t or g
  modified_base (13)..(13): a, c, t or g
cagcaavnatacnhcbhctwcact

SEQ ID NO: 1477 - DNA, 24 bp, Artificial Sequence
  Description of Artificial Sequence: Synthetic oligonucleotide
  modified_base (8)..(8): a, c, t or g
  modified_base (13)..(13): a, c, t or g
cagcaavnatacnhcbhcmtcact

SEQ ID NO: 1478 - DNA, 24 bp, Artificial Sequence
  Description of Artificial Sequence: Synthetic oligonucleotide
  modified_base (8)..(8): a, c, t or g
  modified_base (13)..(13): a, c, t or g
cagcaavnatacnhcbhcwggact

SEQ ID NO: 1479 - DNA, 24 bp, Artificial Sequence
  Description of Artificial Sequence: Synthetic oligonucleotide
  modified_base (8)..(8): a, c, t or g
  modified_base (13)..(13): a, c, t or g
cagcaavnatacnhcbhccctact

SEQ ID NO: 1480 - DNA, 24 bp, Artificial Sequence
  Description of Artificial Sequence: Synthetic oligonucleotide
  modified_base (13)..(13): a, c, t or g
cagcaaagcbhcnhcbhctwcact

SEQ ID NO: 1481 - DNA, 24 bp, Artificial Sequence
  Description of Artificial Sequence: Synthetic oligonucleotide
  modified_base (13)..(13): a, c, t or g
cagcaaagcbhcnhcbhcmtcact

SEQ ID NO: 1482 - DNA, 24 bp, Artificial Sequence
  Description of Artificial Sequence: Synthetic oligonucleotide
  modified_base (13)..(13): a, c, t or g
cagcaaagcbhcnhcbhcwggact

SEQ ID NO: 1483 - DNA, 24 bp, Artificial Sequence
  Description of Artificial Sequence: Synthetic oligonucleotide
  modified_base (13)..(13): a, c, t or g
cagcaaagcbhcnhcbhccctact

SEQ ID NO: 1484 - DNA, 24 bp, Artificial Sequence
  Description of Artificial Sequence: Synthetic oligonucleotide
  modified_base (8)..(8): a, c, t or g
  modified_base (11)..(11): a, c, t or g
atgcagvnamnasrmacttwcact

SEQ ID NO: 1485 - DNA, 24 bp, Artificial Sequence
  Description of Artificial Sequence: Synthetic oligonucleotide
  modified_base (8)..(8): a, c, t or g
  modified_base (11)..(11): a, c, t or g
atgcagvnamnasrmactmtcact

SEQ ID NO: 1486 - DNA, 24 bp, Artificial Sequence
  Description of Artificial Sequence: Synthetic oligonucleotide
  modified_base (8)..(8): a, c, t or g
  modified_base (11)..(11): a, c, t or g
atgcagvnamnasrmactwggact

SEQ ID NO: 1487 - DNA, 24 bp, Artificial Sequence
  Description of Artificial Sequence: Synthetic oligonucleotide
  modified_base (8)..(8): a, c, t or g
  modified_base (11)..(11): a, c, t or g
atgcagvnamnasrmactcctact

SEQ ID NO: 1488 - DNA, 24 bp, Artificial Sequence
  Description of Artificial Sequence: Synthetic oligonucleotide
  modified_base (8)..(8): a, c, t or g
  modified_base (11)..(11): a, c, t or g
atgcagvnamnacagvbctwcact

SEQ ID NO: 1489 - DNA, 24 bp, Artificial Sequence
  Description of Artificial Sequence: Synthetic oligonucleotide
  modified_base (8)..(8): a, c, t or g
  modified_base (11)..(11): a, c, t or g
atgcagvnamnacagvbcmtcact

SEQ ID NO: 1490 - DNA, 24 bp, Artificial Sequence
  Description of Artificial Sequence: Synthetic oligonucleotide
  modified_base (8)..(8): a, c, t or g
  modified_base (11)..(11): a, c, t or g
atgcagvnamnacagvbcwggact

SEQ ID NO: 1491 - DNA, 24 bp, Artificial Sequence
  Description of Artificial Sequence: Synthetic oligonucleotide
  modified_base (8)..(8): a, c, t or g
  modified_base (11)..(11): a, c, t or g
atgcagvnamnacagvbccctact

SEQ ID NO: 1492 - DNA, 24 bp, Artificial Sequence
  Description of Artificial Sequence: Synthetic oligonucleotide
  modified_base (8)..(8): a, c, t or g
atgcagvnactcsrmvbctwcact

SEQ ID NO: 1493 - DNA, 24 bp, Artificial Sequence
  Description of Artificial Sequence: Synthetic oligonucleotide
  modified_base (8)..(8): a, c, t or g
atgcagvnactcsrmvbcmtcact

SEQ ID NO: 1494 - DNA, 24 bp, Artificial Sequence
  Description of Artificial Sequence: Synthetic oligonucleotide
  modified_base (8)..(8): a, c, t or g
atgcagvnactcsrmvbcwggact

SEQ ID NO: 1495 - DNA, 24 bp, Artificial Sequence
  Description of Artificial Sequence: Synthetic oligonucleotide
  modified_base (8)..(8): a, c, t or g
atgcagvnactcsrmvbccctact

SEQ ID NO: 1496 - DNA, 24 bp, Artificial Sequence
  Description of Artificial Sequence: Synthetic oligonucleotide
  modified_base (11)..(11): a, c, t or g
atgcaggcamnasrmvbctwcact

SEQ ID NO: 1497 - DNA, 24 bp, Artificial Sequence
  Description of Artificial Sequence: Synthetic oligonucleotide
  modified_base (11)..(11): a, c, t or g
atgcaggcamnasrmvbcmtcact

SEQ ID NO: 1498 - DNA, 24 bp, Artificial Sequence
  Description of Artificial Sequence: Synthetic oligonucleotide
  modified_base (11)..(11): a, c, t or g
atgcaggcamnasrmvbcwggact

SEQ ID NO: 1499 - DNA, 24 bp, Artificial Sequence
  Description of Artificial Sequence: Synthetic oligonucleotide
  modified_base (11)..(11): a, c, t or g
atgcaggcamnasrmvbccctact

SEQ ID NO: 1500 - DNA, 24 bp, Artificial Sequence
  Description of Artificial Sequence: Synthetic oligonucleotide
  modified_base (10)..(10): a, c, t or g
  modified_base (13)..(13): a, c, t or g
cagcagbhcnhcnhctggtwcact

SEQ ID NO: 1501 - DNA, 24 bp, Artificial Sequence
  Description of Artificial Sequence: Synthetic oligonucleotide
  modified_base (10)..(10): a, c, t or g
  modified_base (13)..(13): a, c, t or g
cagcagbhcnhcnhctggmtcact

SEQ ID NO: 1502 - DNA, 24 bp, Artificial Sequence
  Description of Artificial Sequence: Synthetic oligonucleotide
  modified_base (10)..(10): a, c, t or g
  modified_base (13)..(13): a, c, t or g
cagcagbhcnhcnhctggwggact

SEQ ID NO: 1503 - DNA, 24 bp, Artificial Sequence
  Description of Artificial Sequence: Synthetic oligonucleotide
  modified_base (10)..(10): a, c, t or g
  modified_base (13)..(13): a, c, t or g
cagcagbhcnhcnhctggcctact

SEQ ID NO: 1504 - DNA, 24 bp, Artificial Sequence
  Description of Artificial Sequence: Synthetic oligonucleotide
  modified_base (13)..(13): a, c, t or g
cagcagbhcagtnhcywctwcact

SEQ ID NO: 1505 - DNA, 24 bp, Artificial Sequence
  Description of Artificial Sequence: Synthetic oligonucleotide
  modified_base (13)..(13): a, c, t or g
cagcagbhcagtnhcywcmtcact

SEQ ID NO: 1506 - DNA, 24 bp, Artificial Sequence
  Description of Artificial Sequence: Synthetic oligonucleotide
  modified_base (13)..(13): a, c, t or g
cagcagbhcagtnhcywcwggact

SEQ ID NO: 1507 - DNA, 24 bp, Artificial Sequence
  Description of Artificial Sequence: Synthetic oligonucleotide
  modified_base (13)..(13): a, c, t or g
cagcagbhcagtnhcywccctact

SEQ ID NO: 1508 - DNA, 24 bp, Artificial Sequence
  Description of Artificial Sequence: Synthetic oligonucleotide
  modified_base (10)..(10): a, c, t or g
  modified_base (13)..(13): a, c, t or g
cagcagaganhcnhcywctwcact

SEQ ID NO: 1509 - DNA, 24 bp, Artificial Sequence
  Description of Artificial Sequence: Synthetic oligonucleotide
  modified_base (10)..(10): a, c, t or g
  modified_base (13)..(13): a, c, t or g
cagcagaganhcnhcywcmtcact

SEQ ID NO: 1510 - DNA, 24 bp, Artificial Sequence
  Description of Artificial Sequence: Synthetic oligonucleotide
  modified_base (10)..(10): a, c, t or g
  modified_base (13)..(13): a, c, t or g
cagcagaganhcnhcywcwggact

SEQ ID NO: 1511 - DNA, 24 bp, Artificial Sequence
  Description of Artificial Sequence: Synthetic oligonucleotide
  modified_base (10)..(10): a, c, t or g
  modified_base (13)..(13): a, c, t or g
cagcagaganhcnhcywccctact

SEQ ID NO: 1512 - DNA, 24 bp, Artificial Sequence
  Description of Artificial Sequence: Synthetic oligonucleotide
  modified_base (13)..(13): a, c, t or g
cagcagbhcaatnhcywctwcact

SEQ ID NO: 1513 - DNA, 24 bp, Artificial Sequence
  Description of Artificial Sequence: Synthetic oligonucleotide
  modified_base (13)..(13): a, c, t or g
cagcagbhcaatnhcywcmtcact

SEQ ID NO: 1514 - DNA, 24 bp, Artificial Sequence
  Description of Artificial Sequence: Synthetic oligonucleotide
  modified_base (13)..(13): a, c, t or g
cagcagbhcaatnhcywcwggact

SEQ ID NO: 1515 - DNA, 24 bp, Artificial Sequence
  Description of Artificial Sequence: Synthetic oligonucleotide
  modified_base (13)..(13): a, c, t or g
cagcagbhcaatnhcywccctact

SEQ ID NO: 1516 - DNA, 24 bp, Artificial Sequence
  Description of Artificial Sequence: Synthetic oligonucleotide
  modified_base (14)..(14): a, c, t or g
cagcagbhcbhcvncagttwcact

SEQ ID NO: 1517 - DNA, 24 bp, Artificial Sequence
  Description of Artificial Sequence: Synthetic oligonucleotide
  modified_base (14)..(14): a, c, t or g
cagcagbhcbhcvncagtmtcact

SEQ ID NO: 1518 - DNA, 24 bp, Artificial Sequence
  Description of Artificial Sequence: Synthetic oligonucleotide
  modified_base (14)..(14): a, c, t or g
cagcagbhcbhcvncagtwggact

SEQ ID NO: 1519 - DNA, 24 bp, Artificial Sequence
  Description of Artificial Sequence: Synthetic oligonucleotide
  modified_base (14)..(14): a, c, t or g
cagcagbhcbhcvncagtcctact

SEQ ID NO: 1520 - DNA, 24 bp, Artificial Sequence
  Description of Artificial Sequence: Synthetic oligonucleotide
cagcagbhcbhcagtbhctwcact

SEQ ID NO: 1521 - DNA, 24 bp, Artificial Sequence
  Description of Artificial Sequence: Synthetic oligonucleotide
cagcagbhcbhcagtbhcmtcact

SEQ ID NO: 1522 - DNA, 24 bp, Artificial Sequence
  Description of Artificial Sequence: Synthetic oligonucleotide
cagcagbhcbhcagtbhcwggact

SEQ ID NO: 1523 - DNA, 24 bp, Artificial Sequence
  Description of Artificial Sequence: Synthetic oligonucleotide
cagcagbhcbhcagtbhccctact

SEQ ID NO: 1524 - DNA, 24 bp, Artificial Sequence
  Description of Artificial Sequence: Synthetic oligonucleotide
  modified_base (14)..(14): a, c, t or g
cagcagbhcggavncbhctwcact

SEQ ID NO: 1525 - DNA, 24 bp, Artificial Sequence
  Description of Artificial Sequence: Synthetic oligonucleotide
  modified_base (14)..(14): a, c, t or g
cagcagbhcggavncbhcmtcact

SEQ ID NO: 1526 - DNA, 24 bp, Artificial Sequence
  Description of Artificial Sequence: Synthetic oligonucleotide
  modified_base (14)..(14): a, c, t or g
cagcagbhcggavncbhcwggact

SEQ ID NO: 1527 - DNA, 24 bp, Artificial Sequence
  Description of Artificial Sequence: Synthetic oligonucleotide
  modified_base (14)..(14): a, c, t or g
cagcagbhcggavncbhccctact

SEQ ID NO: 1528 - DNA, 24 bp, Artificial Sequence
  Description of Artificial Sequence: Synthetic oligonucleotide
  modified_base (14)..(14): a, c, t or g
cagcagtacbhcvncbhctwcact

SEQ ID NO: 1529 - DNA, 24 bp, Artificial Sequence
  Description of Artificial Sequence: Synthetic oligonucleotide
  modified_base (14)..(14): a, c, t or g
cagcagtacbhcvncbhcmtcact

SEQ ID NO: 1530 - DNA, 24 bp, Artificial Sequence
  Description of Artificial Sequence: Synthetic oligonucleotide
  modified_base (14)..(14): a, c, t or g
cagcagtacbhcvncbhcwggact

SEQ ID NO: 1531 - DNA, 24 bp, Artificial Sequence
  Description of Artificial Sequence: Synthetic oligonucleotide
  modified_base (14)..(14): a, c, t or g
cagcagtacbhcvncbhccctact

SEQ ID NO: 1532 - DNA, 24 bp, Artificial Sequence
  Description of Artificial Sequence: Synthetic oligonucleotide
  modified_base (13)..(13): a, c, t or g
cagcagbhcbhcnhcacttwcact

SEQ ID NO: 1533 - DNA, 24 bp, Artificial Sequence
  Description of Artificial Sequence: Synthetic oligonucleotide
  modified_base (13)..(13): a, c, t or g
cagcagbhcbhcnhcactmtcact

SEQ ID NO: 1534 - DNA, 24 bp, Artificial Sequence
  Description of Artificial Sequence: Synthetic oligonucleotide
  modified_base (13)..(13): a, c, t or g
cagcagbhcbhcnhcactwggact

SEQ ID NO: 1535 - DNA, 24 bp, Artificial Sequence
  Description of Artificial Sequence: Synthetic oligonucleotide
  modified_base (13)..(13): a, c, t or g
cagcagbhcbhcnhcactcctact

SEQ ID NO: 1536 - DNA, 24 bp, Artificial Sequence
  Description of Artificial Sequence: Synthetic oligonucleotide
  modified_base (13)..(13): a, c, t or g
cagcagbhctacnhcbhctwcact

SEQ ID NO: 1537 - DNA, 24 bp, Artificial Sequence
  Description of Artificial Sequence: Synthetic oligonucleotide
  modified_base (13)..(13): a, c, t or g
cagcagbhctacnhcbhcmtcact

SEQ ID NO: 1538 - DNA, 24 bp, Artificial Sequence
  Description of Artificial Sequence: Synthetic oligonucleotide
  modified_base (13)..(13): a, c, t or g
cagcagbhctacnhcbhcwggact

SEQ ID NO: 1539 - DNA, 24 bp, Artificial Sequence
  Description of Artificial Sequence: Synthetic oligonucleotide
  modified_base (13)..(13): a, c, t or g
cagcagbhctacnhcbhccctact

SEQ ID NO: 1540 - DNA, 24 bp, Artificial Sequence
  Description of Artificial Sequence: Synthetic oligonucleotide
  modified_base (13)..(13): a, c, t or g
cagcagtacbhcnhcbhctwcact

SEQ ID NO: 1541 - DNA, 24 bp, Artificial Sequence
  Description of Artificial Sequence: Synthetic oligonucleotide
  modified_base (13)..(13): a, c, t or g
cagcagtacbhcnhcbhcmtcact

SEQ ID NO: 1542 - DNA, 24 bp, Artificial Sequence
  Description of Artificial Sequence: Synthetic oligonucleotide
  modified_base (13)..(13): a, c, t or g
cagcagtacbhcnhcbhcwggact

SEQ ID NO: 1543 - DNA, 24 bp, Artificial Sequence
  Description of Artificial Sequence: Synthetic oligonucleotide
  modified_base (13)..(13): a, c, t or g
cagcagtacbhcnhcbhccctact

SEQ ID NO: 1544 - DNA, 72 bp, Artificial Sequence
  Description of Artificial Sequence: Synthetic oligonucleotide
cctgatgattttgcaacttattactgcswmswmtacaatagttacycttwcacttttggcggagggaccaag

SEQ ID NO: 1545 - DNA, 72 bp, Artificial Sequence
  Description of Artificial Sequence: Synthetic oligonucleotide
cctgatgattttgcaacttattactgccagcagbhcvrmagttacycttwcacttttggcggagggaccaag

SEQ ID NO: 1546 - DNA, 72 bp, Artificial Sequence
  Description of Artificial Sequence: Synthetic oligonucleotide
cctgatgattttgcaacttattactgccagcagbhcaatmbctacycttwcacttttggcggagggaccaag

SEQ ID NO: 1547 - DNA, 72 bp, Artificial Sequence
  Description of Artificial Sequence: Synthetic oligonucleotide
cctgatgattttgcaacttattactgccagcagbhcaatagtywcycttwcacttttggcggagggaccaag

SEQ ID NO: 1548 - DNA, 72 bp, Artificial Sequence
  Description of Artificial Sequence: Synthetic oligonucleotide
cctgatgattttgcaacttattactgccagcagtacvrmmbctacycttwcacttttggcggagggaccaag

SEQ ID NO: 1549 - DNA, 72 bp, Artificial Sequence
  Description of Artificial Sequence: Synthetic oligonucleotide
cctgatgattttgcaacttattactgccagcagtacvrmagtywcycttwcacttttggcggagggaccaag

SEQ ID NO: 1550 - DNA, 72 bp, Artificial Sequence
  Description of Artificial Sequence: Synthetic oligonucleotide
cctgatgattttgcaacttattactgccagcagtacaatmbcywcycttwcacttttggcggagggaccaag

SEQ ID NO: 1551 - DNA, 72 bp, Artificial Sequence
  Description of Artificial Sequence: Synthetic oligonucleotide
cctgatgattttgcaacttattactgcswmcagbhcaatagttacycttwcacttttggcggagggaccaag

SEQ ID NO: 1552 - DNA, 72 bp, Artificial Sequence
  Description of Artificial Sequence: Synthetic oligonucleotide
cctgatgattttgcaacttattactgcswmcagtacvrmagttacycttwcacttttggcggagggaccaag

SEQ ID NO: 1553 - DNA, 72 bp, Artificial Sequence
  Description of Artificial Sequence: Synthetic oligonucleotide
cctgatgattttgcaacttattactgcswmcagtacaatmbctacycttwcacttttggcggagggaccaag

SEQ ID NO: 1554 - DNA, 72 bp, Artificial Sequence
  Description of Artificial Sequence: Synthetic oligonucleotide
cctgatgattttgcaacttattactgcswmcagtacaatagtywcycttwcacttttggcggagggaccaag

SEQ ID NO: 1555 - DNA, 72 bp, Artificial Sequence
  Description of Artificial Sequence: Synthetic oligonucleotide
cctgatgattttgcaacttattactgccagswmbhcaatagttacycttwcacttttggcggagggaccaag

SEQ ID NO: 1556 - DNA, 72 bp, Artificial Sequence
  Description of Artificial Sequence: Synthetic oligonucleotide
cctgatgattttgcaacttattactgccagswmtacvrmagttacycttwcacttttggcggagggaccaag

SEQ ID NO: 1557 - DNA, 72 bp, Artificial Sequence
  Description of Artificial Sequence: Synthetic oligonucleotide
cctgatgattttgcaacttattactgccagswmtacaatmbctacycttwcacttttggcggagggaccaag

SEQ ID NO: 1558 - DNA, 72 bp, Artificial Sequence
  Description of Artificial Sequence: Synthetic oligonucleotide
cctgatgattttgcaacttattactgccagswmtacaatagtywcycttwcacttttggcggagggaccaag

SEQ ID NO: 1559 - DNA, 72 bp, Artificial Sequence
  Description of Artificial Sequence: Synthetic oligonucleotide
cctgatgattttgcaacttattactgcswmswmtacaatagttacyctmtcacttttggcggagggaccaag

SEQ ID NO: 1560 - DNA, 72 bp, Artificial Sequence
  Description of Artificial Sequence: Synthetic oligonucleotide
cctgatgattttgcaacttattactgccagcagbhcvrmagttacyctmtcacttttggcggagggaccaag

SEQ ID NO: 1561 - DNA, 72 bp, Artificial Sequence
  Description of Artificial Sequence: Synthetic oligonucleotide
cctgatgattttgcaacttattactgccagcagbhcaatmbctacyctmtcacttttggcggagggaccaag

SEQ ID NO: 1562 - DNA, 72 bp, Artificial Sequence
  Description of Artificial Sequence: Synthetic oligonucleotide
cctgatgattttgcaacttattactgccagcagbhcaatagtywcyctmtcacttttggcggagggaccaag

SEQ ID NO: 1563 - DNA, 72 bp, Artificial Sequence
  Description of Artificial Sequence: Synthetic oligonucleotide
cctgatgattttgcaacttattactgccagcagtacvrmmbctacyctmtcacttttggcggagggaccaag

SEQ ID NO: 1564 - DNA, 72 bp, Artificial Sequence
  Description of Artificial Sequence: Synthetic oligonucleotide
cctgatgattttgcaacttattactgccagcagtacvrmagtywcyctmtcacttttggcggagggaccaag

SEQ ID NO: 1565 - DNA, 72 bp, Artificial Sequence
  Description of Artificial Sequence: Synthetic oligonucleotide
cctgatgattttgcaacttattactgccagcagtacaatmbcywcyctmtcacttttggcggagggaccaag

SEQ ID NO: 1566 - DNA, 72 bp, Artificial Sequence
  Description of Artificial Sequence: Synthetic oligonucleotide
cctgatgattttgcaacttattactgcswmcagbhcaatagttacyctmtcacttttggcggagggaccaag

SEQ ID NO: 1567 - DNA, 72 bp, Artificial Sequence
  Description of Artificial Sequence: Synthetic oligonucleotide
cctgatgattttgcaacttattactgcswmcagtacvrmagttacyctmtcacttttggcggagggaccaag

SEQ ID NO: 1568 - DNA, 72 bp, Artificial Sequence
  Description of Artificial Sequence: Synthetic oligonucleotide
cctgatgattttgcaacttattactgcswmcagtacaatmbctacyctmtcacttttggcggagggaccaag

SEQ ID NO: 1569 - DNA, 72 bp, Artificial Sequence
  Description of Artificial Sequence: Synthetic oligonucleotide
cctgatgattttgcaacttattactgcswmcagtacaatagtywcyctmtcacttttggcggagggaccaag

SEQ ID NO: 1570 - DNA, 72 bp, Artificial Sequence
  Description of Artificial Sequence: Synthetic oligonucleotide
cctgatgattttgcaacttattactgccagswmbhcaatagttacyctmtcacttttggcggagggaccaag

SEQ ID NO: 1571 - DNA, 72 bp, Artificial Sequence
  Description of Artificial Sequence: Synthetic oligonucleotide
cctgatgattttgcaacttattactgccagswmtacvrmagttacyctmtcacttttggcggagggaccaag

SEQ ID NO: 1572 - DNA, 72 bp, Artificial Sequence
  Description of Artificial Sequence: Synthetic oligonucleotide
cctgatgattttgcaacttattactgccagswmtacaatmbctacyctmtcacttttggcggagggaccaag

SEQ ID NO: 1573 - DNA, 72 bp, Artificial Sequence
  Description of Artificial Sequence: Synthetic oligonucleotide
cctgatgattttgcaacttattactgccagswmtacaatagtywcyctmtcacttttggcggagggaccaag

SEQ ID NO: 1574 - DNA, 72 bp, Artificial Sequence
  Description of Artificial Sequence: Synthetic oligonucleotide
cctgatgattttgcaacttattactgcswmswmtacaatagttacyctwggacttttggcggagggaccaag

SEQ ID NO: 1575 - DNA, 72 bp, Artificial Sequence
  Description of Artificial Sequence: Synthetic oligonucleotide
cctgatgattttgcaacttattactgccagcagbhcvrmagttacyctwggacttttggcggagggaccaag

SEQ ID NO: 1576 - DNA, 72 bp, Artificial Sequence
  Description of Artificial Sequence: Synthetic oligonucleotide
cctgatgattttgcaacttattactgccagcagbhcaatmbctacyctwggacttttggcggagggaccaag

SEQ ID NO: 1577 - DNA, 72 bp, Artificial Sequence
  Description of Artificial Sequence: Synthetic oligonucleotide
cctgatgattttgcaacttattactgccagcagbhcaatagtywcyctwggacttttggcggagggaccaag

SEQ ID NO: 1578 - DNA, 72 bp, Artificial Sequence
  Description of Artificial Sequence: Synthetic oligonucleotide
cctgatgattttgcaacttattactgccagcagtacvrmmbctacyctwggacttttggcggagggaccaag

SEQ ID NO: 1579 - DNA, 72 bp, Artificial Sequence
  Description of Artificial Sequence: Synthetic oligonucleotide
cctgatgattttgcaacttattactgccagcagtacvrmagtywcyctwggacttttggcggagggaccaag

SEQ ID NO: 1580 - DNA, 72 bp, Artificial Sequence
  Description of Artificial Sequence: Synthetic oligonucleotide
cctgatgattttgcaacttattactgccagcagtacaatmbcywcyctwggacttttggcggagggaccaag

SEQ ID NO: 1581 - DNA, 72 bp, Artificial Sequence
  Description of Artificial Sequence: Synthetic oligonucleotide
cctgatgattttgcaacttattactgcswmcagbhcaatagttacyctwggacttttggcggagggaccaag

SEQ ID NO: 1582 - DNA, 72 bp, Artificial Sequence
  Description of Artificial Sequence: Synthetic oligonucleotide
cctgatgattttgcaacttattactgcswmcagtacvrmagttacyctwggacttttggcggagggaccaag

SEQ ID NO: 1583 - DNA, 72 bp, Artificial Sequence
  Description of Artificial Sequence: Synthetic oligonucleotide
cctgatgattttgcaacttattactgcswmcagtacaatmbctacyctwggacttttggcggagggaccaag

SEQ ID NO: 1584 - DNA, 72 bp, Artificial Sequence
  Description of Artificial Sequence: Synthetic oligonucleotide
cctgatgattttgcaacttattactgcswmcagtacaatagtywcyctwggacttttggcggagggaccaag

SEQ ID NO: 1585 - DNA, 72 bp, Artificial Sequence
  Description of Artificial Sequence: Synthetic oligonucleotide
cctgatgattttgcaacttattactgccagswmbhcaatagttacyctwggacttttggcggagggaccaag

SEQ ID NO: 1586 - DNA, 72 bp, Artificial Sequence
  Description of Artificial Sequence: Synthetic oligonucleotide
cctgatgattttgcaacttattactgccagswmtacvrmagttacyctwggacttttggcggagggaccaag

SEQ ID NO: 1587 - DNA, 72 bp, Artificial Sequence
  Description of Artificial Sequence: Synthetic oligonucleotide
cctgatgattttgcaacttattactgccagswmtacaatmbctacyctwggacttttggcggagggaccaag

SEQ ID NO: 1588 - DNA, 72 bp, Artificial Sequence
  Description of Artificial Sequence: Synthetic oligonucleotide
cctgatgattttgcaacttattactgccagswmtacaatagtywcyctwggacttttggcggagggaccaag

SEQ ID NO: 1589 - DNA, 72 bp, Artificial Sequence
  Description of Artificial Sequence: Synthetic oligonucleotide
cctgatgattttgcaacttattactgcswmswmtacaatagttacyctcctacttttggcggagggaccaag

SEQ ID NO: 1590 - DNA, 72 bp, Artificial Sequence
  Description of Artificial Sequence: Synthetic oligonucleotide
cctgatgattttgcaacttattactgccagcagbhcvrmagttacyctcctacttttggcggagggaccaag

SEQ ID NO: 1591 - DNA, 72 bp, Artificial Sequence
  Description of Artificial Sequence: Synthetic oligonucleotide
cctgatgattttgcaacttattactgccagcagbhcaatmbctacyctcctacttttggcggagggaccaag

SEQ ID NO: 1592 - DNA, 72 bp, Artificial Sequence
  Description of Artificial Sequence: Synthetic oligonucleotide
cctgatgattttgcaacttattactgccagcagbhcaatagtywcyctcctacttttggcggagggaccaag

SEQ ID NO: 1593 - DNA, 72 bp, Artificial Sequence
  Description of Artificial Sequence: Synthetic oligonucleotide
cctgatgattttgcaacttattactgccagcagtacvrmmbctacyctcctacttttggcggagggaccaag

SEQ ID NO: 1594 - DNA, 72 bp, Artificial Sequence
  Description of Artificial Sequence: Synthetic oligonucleotide
cctgatgattttgcaacttattactgccagcagtacvrmagtywcyctcctacttttggcggagggaccaag

SEQ ID NO: 1595 - DNA, 72 bp, Artificial Sequence
  Description of Artificial Sequence: Synthetic oligonucleotide
cctgatgattttgcaacttattactgccagcagtacaatmbcywcyctcctacttttggcggagggaccaag

SEQ ID NO: 1596 - DNA, 72 bp, Artificial Sequence
  Description of Artificial Sequence: Synthetic oligonucleotide
cctgatgattttgcaacttattactgcswmcagbhcaatagttacyctcctacttttggcggagggaccaag

SEQ ID NO: 1597 - DNA, 72 bp, Artificial Sequence
  Description of Artificial Sequence: Synthetic oligonucleotide
cctgatgattttgcaacttattactgcswmcagtacvrmagttacyctcctacttttggcggagggaccaag

SEQ ID NO: 1598 - DNA, 72 bp, Artificial Sequence
  Description of Artificial Sequence: Synthetic oligonucleotide
cctgatgattttgcaacttattactgcswmcagtacaatmbctacyctcctacttttggcggagggaccaag

SEQ ID NO: 1599 - DNA, 72 bp, Artificial Sequence
  Description of Artificial Sequence: Synthetic oligonucleotide
cctgatgattttgcaacttattactgcswmcagtacaatagtywcyctcctacttttggcggagggaccaag

SEQ ID NO: 1600 - DNA, 72 bp, Artificial Sequence
  Description of Artificial Sequence: Synthetic oligonucleotide
cctgatgattttgcaacttattactgccagswmbhcaatagttacyctcctacttttggcggagggaccaag

SEQ ID NO: 1601 - DNA, 72 bp, Artificial Sequence
  Description of Artificial Sequence: Synthetic oligonucleotide
cctgatgattttgcaacttattactgccagswmtacvrmagttacyctcctacttttggcggagggaccaag

SEQ ID NO: 1602 - DNA, 72 bp, Artificial Sequence
  Description of Artificial Sequence: Synthetic oligonucleotide
cctgatgattttgcaacttattactgccagswmtacaatmbctacyctcctacttttggcggagggaccaag

SEQ ID NO: 1603 - DNA, 72 bp, Artificial Sequence
  Description of Artificial Sequence: Synthetic oligonucleotide
cctgatgattttgcaacttattactgccagswmtacaatagtywcyctcctacttttggcggagggaccaag

SEQ ID NO: 1604 - DNA, 72 bp, Artificial Sequence
  Description of Artificial Sequence: Synthetic oligonucleotide
cctgaagattttgcaacttattactgtswmswmgcaaatagtttcccttwcacttttggcggagggaccaag

SEQ ID NO: 1605 - DNA, 72 bp, Artificial Sequence
  Description of Artificial Sequence: Synthetic oligonucleotide
  modified_base (35)..(35): a, c, t or g
  modified_base (37)..(37): a, c, t or g
cctgaagattttgcaacttattactgtcagcagrnanhcagtttcccttwcacttttggcggagggaccaag

SEQ ID NO: 1606 - DNA, 72 bp, Artificial Sequence
  Description of Artificial Sequence: Synthetic oligonucleotide
  modified_base (35)..(35): a, c, t or g
  modified_base (40)..(40): a, c, t or g
cctgaagattttgcaacttattactgtcagcagrnaaatnhcttcccttwcacttttggcggagggaccaag

SEQ ID NO: 1607 - DNA, 72 bp, Artificial Sequence
  Description of Artificial Sequence: Synthetic oligonucleotide
  modified_base (35)..(35): a, c, t or g
cctgaagattttgcaacttattactgtcagcagrnaaatagtywcccttwcacttttggcggagggaccaag

SEQ ID NO: 1608 - DNA, 72 bp, Artificial Sequence
  Description of Artificial Sequence: Synthetic oligonucleotide
  modified_base (37)..(37): a, c, t or g
  modified_base (40)..(40): a, c, t or g
cctgaagattttgcaacttattactgtcagcaggcanhcnhcttcccttwcacttttggcggagggaccaag

SEQ ID NO: 1609 - DNA, 72 bp, Artificial Sequence
  Description of Artificial Sequence: Synthetic oligonucleotide
  modified_base (37)..(37): a, c, t or g
cctgaagattttgcaacttattactgtcagcaggcanhcagtywcccttwcacttttggcggagggaccaag

SEQ ID NO: 1610 - DNA, 72 bp, Artificial Sequence
  Description of Artificial Sequence: Synthetic oligonucleotide
  modified_base (40)..(40): a, c, t or g
cctgaagattttgcaacttattactgtcagcaggcaaatnhcywcccttwcacttttggcggagggaccaag

SEQ ID NO: 1611 - DNA, 72 bp, Artificial Sequence
  Description of Artificial Sequence: Synthetic oligonucleotide
  modified_base (35)..(35): a, c, t or g
cctgaagattttgcaacttattactgtswmcagrnaaatagtttcccttwcacttttggcggagggaccaag

SEQ ID NO: 1612 - DNA, 72 bp, Artificial Sequence
  Description of Artificial Sequence: Synthetic oligonucleotide
  modified_base (37)..(37): a, c, t or g
cctgaagattttgcaacttattactgtswmcaggcanhcagtttcccttwcacttttggcggagggaccaag

SEQ ID NO: 1613 - DNA, 72 bp, Artificial Sequence
  Description of Artificial Sequence: Synthetic oligonucleotide
  modified_base (40)..(40): a, c, t or g
cctgaagattttgcaacttattactgtswmcaggcaaatnhcttcccttwcacttttggcggagggaccaag

SEQ ID NO: 1614 - DNA, 72 bp, Artificial Sequence
  Description of Artificial Sequence: Synthetic oligonucleotide
cctgaagattttgcaacttattactgtswmcaggcaaatagtywcccttwcacttttggcggagggaccaag

SEQ ID NO: 1615 - DNA, 72 bp, Artificial Sequence
  Description of Artificial Sequence: Synthetic oligonucleotide
  modified_base (35)..(35): a, c, t or g
cctgaagattttgcaacttattactgtcagswmrnaaatagtttcccttwcacttttggcggagggaccaag

SEQ ID NO: 1616 - DNA, 72 bp, Artificial Sequence
  Description of Artificial Sequence: Synthetic oligonucleotide
  modified_base (37)..(37): a, c, t or g
cctgaagattttgcaacttattactgtcagswmgcanhcagtttcccttwcacttttggcggagggaccaag

SEQ ID NO: 1617 - DNA, 72 bp, Artificial Sequence
  Description of Artificial Sequence: Synthetic oligonucleotide
  modified_base (40)..(40): a, c, t or g
cctgaagattttgcaacttattactgtcagswmgcaaatnhcttcccttwcacttttggcggagggaccaag

SEQ ID NO: 1618 - DNA, 72 bp, Artificial Sequence
  Description of Artificial Sequence: Synthetic oligonucleotide
cctgaagattttgcaacttattactgtcagswmgcaaatagtywcccttwcacttttggcggagggaccaag

SEQ ID NO: 1619 - DNA, 72 bp, Artificial Sequence
  Description of Artificial Sequence: Synthetic oligonucleotide
cctgaagattttgcaacttattactgtswmswmgcaaatagtttccctmtcacttttggcggagggaccaag

SEQ ID NO: 1620 - DNA, 72 bp, Artificial Sequence
  Description of Artificial Sequence: Synthetic oligonucleotide
  modified_base (35)..(35): a, c, t or g
  modified_base (37)..(37): a, c, t or g
cctgaagattttgcaacttattactgtcagcagrnanhcagtttccctmtcacttttggcggagggaccaag

SEQ ID NO: 1621 - DNA, 72 bp, Artificial Sequence
  Description of Artificial Sequence: Synthetic oligonucleotide
  modified_base (35)..(35): a, c, t or g
  modified_base (40)..(40): a, c, t or g
cctgaagattttgcaacttattactgtcagcagrnaaatnhcttccctmtcacttttggcggagggaccaag

SEQ ID NO: 1622 - DNA, 72 bp, Artificial Sequence
  Description of Artificial Sequence: Synthetic oligonucleotide
  modified_base (35)..(35): a, c, t or g
cctgaagattttgcaacttattactgtcagcagrnaaatagtywccctmtcacttttggcggagggaccaag

SEQ ID NO: 1623 - DNA, 72 bp, Artificial Sequence
  Description of Artificial Sequence: Synthetic oligonucleotide
  modified_base (37)..(37): a, c, t or g
  modified_base (40)..(40): a, c, t or g
cctgaagattttgcaacttattactgtcagcaggcanhcnhcttccctmtcacttttggcggagggaccaag

SEQ ID NO: 1624 - DNA, 72 bp, Artificial Sequence
  Description of Artificial Sequence: Synthetic oligonucleotide
  modified_base (37)..(37): a, c, t or g
cctgaagattttgcaacttattactgtcagcaggcanhcagtywccctmtcacttttggcggagggaccaag

SEQ ID NO: 1625 - DNA, 72 bp, Artificial Sequence
  Description of Artificial Sequence: Synthetic oligonucleotide
  modified_base (40)..(40): a, c, t or g
cctgaagattttgcaacttattactgtcagcaggcaaatnhcywccctmtcacttttggcggagggaccaag

SEQ ID NO: 1626 - DNA, 72 bp, Artificial Sequence
  Description of Artificial Sequence: Synthetic oligonucleotide
  modified_base (35)..(35): a, c, t or g
cctgaagattttgcaacttattactgtswmcagrnaaatagtttccctmtcacttttggcggagggaccaag

SEQ ID NO: 1627 - DNA, 72 bp, Artificial Sequence
  Description of Artificial Sequence: Synthetic oligonucleotide
  modified_base (37)..(37): a, c, t or g
cctgaagattttgcaacttattactgtswmcaggcanhcagtttccctmtcacttttggcggagggaccaag

SEQ ID NO: 1628 - DNA, 72 bp, Artificial Sequence
  Description of Artificial Sequence: Synthetic oligonucleotide
  modified_base (40)..(40): a, c, t or g
cctgaagattttgcaacttattactgtswmcaggcaaatnhcttccctmtcacttttggcggagggaccaag

SEQ ID NO: 1629 - DNA, 72 bp, Artificial Sequence
  Description of Artificial Sequence: Synthetic oligonucleotide
cctgaagattttgcaacttattactgtswmcaggcaaatagtywccctmtcacttttggcggagggaccaag

SEQ ID NO: 1630 - DNA, 72 bp, Artificial Sequence
  Description of Artificial Sequence: Synthetic oligonucleotide
  modified_base (35)..(35): a, c, t or g
cctgaagattttgcaacttattactgtcagswmrnaaatagtttccctmtcacttttggcggagggaccaag

SEQ ID NO: 1631 - DNA, 72 bp, Artificial Sequence
  Description of Artificial Sequence: Synthetic oligonucleotide
  modified_base (37)..(37): a, c, t or g
cctgaagattttgcaacttattactgtcagswmgcanhcagtttccctmtcacttttggcggagggaccaag

SEQ ID NO: 1632 - DNA, 72 bp, Artificial Sequence
  Description of Artificial Sequence: Synthetic oligonucleotide
  modified_base (40)..(40): a, c, t or g
cctgaagattttgcaacttattactgtcagswmgcaaatnhcttccctmtcacttttggcggagggaccaag

SEQ ID NO: 1633 - DNA, 72 bp, Artificial Sequence
  Description of Artificial Sequence: Synthetic oligonucleotide
cctgaagattttgcaacttattactgtcagswmgcaaatagtywccctmtcacttttggcggagggaccaag

SEQ ID NO: 1634 - DNA, 72 bp, Artificial Sequence
  Description of Artificial Sequence: Synthetic oligonucleotide
cctgaagattttgcaacttattactgtswmswmgcaaatagtttccctwggacttttggcggagggaccaag

SEQ ID NO: 1635 - DNA, 72 bp, Artificial Sequence
  Description of Artificial Sequence: Synthetic oligonucleotide
  modified_base (35)..(35): a, c, t or g
  modified_base (37)..(37): a, c, t or g
cctgaagattttgcaacttattactgtcagcagrnanhcagtttccctwggacttttggcggagggaccaag

SEQ ID NO: 1636 - DNA, 72 bp, Artificial Sequence
  Description of Artificial Sequence: Synthetic oligonucleotide
  modified_base (35)..(35): a, c, t or g
  modified_base (40)..(40): a, c, t or g
cctgaagattttgcaacttattactgtcagcagrnaaatnhcttccctwggacttttggcggagggaccaag

SEQ ID NO: 1637 - DNA, 72 bp, Artificial Sequence
  Description of Artificial Sequence: Synthetic oligonucleotide
  modified_base (35)..(35): a, c, t or g
cctgaagattttgcaacttattactgtcagcagrnaaatagtywccctwggacttttggcggagggaccaag

SEQ ID NO: 1638 - DNA, 72 bp, Artificial Sequence
  Description of Artificial Sequence: Synthetic oligonucleotide
  modified_base (37)..(37): a, c, t or g
  modified_base (40)..(40): a, c, t or g
cctgaagattttgcaacttattactgtcagcaggcanhcnhcttccctwggacttttggcggagggaccaag

SEQ ID NO: 1639 - DNA, 72 bp, Artificial Sequence
  Description of Artificial Sequence: Synthetic oligonucleotide
  modified_base (37)..(37): a, c, t or g
cctgaagattttgcaacttattactgtcagcaggcanhcagtywccctwggacttttggcggagggaccaag

SEQ ID NO: 1640 - DNA, 72 bp, Artificial Sequence
  Description of Artificial Sequence: Synthetic oligonucleotide
  modified_base (40)..(40): a, c, t or g
cctgaagattttgcaacttattactgtcagcaggcaaatnhcywccctwggacttttggcggagggaccaag

SEQ ID NO: 1641 - DNA, 72 bp, Artificial Sequence
  Description of Artificial Sequence: Synthetic oligonucleotide
  modified_base (35)..(35): a, c, t or g
cctgaagattttgcaacttattactgtswmcagrnaaatagtttccctwggacttttggcggagggaccaag

SEQ ID NO: 1642 - DNA, 72 bp, Artificial Sequence
  Description of Artificial Sequence: Synthetic oligonucleotide
  modified_base (37)..(37): a, c, t or g
cctgaagattttgcaacttattactgtswmcaggcanhcagtttccctwggacttttggcggagggaccaag

SEQ ID NO: 1643 - DNA, 72 bp, Artificial Sequence
  Description of Artificial Sequence: Synthetic oligonucleotide
  modified_base (40)..(40): a, c, t or g
cctgaagattttgcaacttattactgtswmcaggcaaatnhcttccctwggacttttggcggagggaccaag

SEQ ID NO: 1644 - DNA, 72 bp, Artificial Sequence
  Description of Artificial Sequence: Synthetic oligonucleotide
cctgaagattttgcaacttattactgtswmcaggcaaatagtywccctwggacttttggcggagggaccaag

SEQ ID NO: 1645 - DNA, 72 bp, Artificial Sequence
  Description of Artificial Sequence: Synthetic oligonucleotide
  modified_base (35)..(35): a, c, t or g
cctgaagattttgcaacttattactgtcagswmrnaaatagtttccctwggacttttggcggagggaccaag

SEQ ID NO: 1646 - DNA, 72 bp, Artificial Sequence
  Description of Artificial Sequence: Synthetic oligonucleotide
  modified_base (37)..(37): a, c, t or g
cctgaagattttgcaacttattactgtcagswmgcanhcagtttccctwggacttttggcggagggaccaag

SEQ ID NO: 1647 - DNA, 72 bp, Artificial Sequence
  Description of Artificial Sequence: Synthetic oligonucleotide
  modified_base (40)..(40): a, c, t or g
cctgaagattttgcaacttattactgtcagswmgcaaatnhcttccctwggacttttggcggagggaccaag

SEQ ID NO: 1648 - DNA, 72 bp, Artificial Sequence
  Description of Artificial Sequence: Synthetic oligonucleotide
cctgaagattttgcaacttattactgtcagswmgcaaatagtywccctwggacttttggcggagggaccaag

SEQ ID NO: 1649 - DNA, 72 bp, Artificial Sequence
  Description of Artificial Sequence: Synthetic oligonucleotide
cctgaagattttgcaacttattactgtswmswmgcaaatagtttccctcctacttttggcggagggaccaag

SEQ ID NO: 1650 - DNA, 72 bp, Artificial Sequence
  Description of Artificial Sequence: Synthetic oligonucleotide
  modified_base (35)..(35): a, c, t or g
  modified_base (37)..(37): a, c, t or g
cctgaagattttgcaacttattactgtcagcagrnanhcagtttccctcctacttttggcggagggaccaag

SEQ ID NO: 1651 - DNA, 72 bp, Artificial Sequence
  Description of Artificial Sequence: Synthetic oligonucleotide
  modified_base (35)..(35): a, c, t or g
  modified_base (40)..(40): a, c, t or g
cctgaagattttgcaacttattactgtcagcagrnaaatnhcttccctcctacttttggcggagggaccaag

SEQ ID NO: 1652 - DNA, 72 bp, Artificial Sequence
  Description of Artificial Sequence: Synthetic oligonucleotide
  modified_base (35)..(35): a, c, t or g
cctgaagattttgcaacttattactgtcagcagrnaaatagtywccctcctacttttggcggagggaccaag

SEQ ID NO: 1653 - DNA, 72 bp, Artificial Sequence
  Description of Artificial Sequence: Synthetic oligonucleotide
  modified_base (37)..(37): a, c, t or g
  modified_base (40)..(40): a, c, t or g
cctgaagattttgcaacttattactgtcagcaggcanhcnhcttccctcctacttttggcggagggaccaag

SEQ ID NO: 1654 - DNA, 72 bp, Artificial Sequence
  Description of Artificial Sequence: Synthetic oligonucleotide
  modified_base (37)..(37): a, c, t or g
cctgaagattttgcaacttattactgtcagcaggcanhcagtywccctcctacttttggcggagggaccaag

SEQ ID NO: 1655 - DNA, 72 bp, Artificial Sequence
  Description of Artificial Sequence: Synthetic oligonucleotide
  modified_base (40)..(40): a, c, t or g
cctgaagattttgcaacttattactgtcagcaggcaaatnhcywccctcctacttttggcggagggaccaag

SEQ ID NO: 1656 - DNA, 72 bp, Artificial Sequence
  Description of Artificial Sequence: Synthetic oligonucleotide
  modified_base (35)..(35): a, c, t or g
cctgaagattttgcaacttattactgtswmcagrnaaatagtttccctcctacttttggcggagggaccaag

SEQ ID NO: 1657 - DNA, 72 bp, Artificial Sequence
  Description of Artificial Sequence: Synthetic oligonucleotide
  modified_base (37)..(37): a, c, t or g
cctgaagattttgcaacttattactgtswmcaggcanhcagtttccctcctacttttggcggagggaccaag

SEQ ID NO: 1658 - DNA, 72 bp, Artificial Sequence
  Description of Artificial Sequence: Synthetic oligonucleotide
  modified_base (40)..(40): a, c, t or g
cctgaagattttgcaacttattactgtswmcaggcaaatnhcttccctcctacttttggcggagggaccaag

SEQ ID NO: 1659 - DNA, 72 bp, Artificial Sequence
  Description of Artificial Sequence: Synthetic oligonucleotide
cctgaagattttgcaacttattactgtswmcaggcaaatagtywccctcctacttttggcggagggaccaag

SEQ ID NO: 1660 - DNA, 72 bp, Artificial Sequence
  Description of Artificial Sequence: Synthetic oligonucleotide
  modified_base (35)..(35): a, c, t or g
cctgaagattttgcaacttattactgtcagswmrnaaatagtttccctcctacttttggcggagggaccaag

SEQ ID NO: 1661 - DNA, 72 bp, Artificial Sequence
  Description of Artificial Sequence: Synthetic oligonucleotide
  modified_base (37)..(37): a, c, t or g
cctgaagattttgcaacttattactgtcagswmgcanhcagtttccctcctacttttggcggagggaccaag

SEQ ID NO: 1662 - DNA, 72 bp, Artificial Sequence
  Description of Artificial Sequence: Synthetic oligonucleotide
  modified_base (40)..(40): a, c, t or g
cctgaagattttgcaacttattactgtcagswmgcaaatnhcttccctcctacttttggcggagggaccaag

SEQ ID NO: 1663 - DNA, 72 bp, Artificial Sequence
  Description of Artificial Sequence: Synthetic oligonucleotide
cctgaagattttgcaacttattactgtcagswmgcaaatagtywccctcctacttttggcggagggaccaag

SEQ ID NO: 1664 - DNA, 72 bp, Artificial Sequence
  Description of Artificial Sequence: Synthetic oligonucleotide
cctgaagatattgcaacatattactgtswmswmtacgataatctcccttwcacttttggcggagggaccaag

SEQ ID NO: 1665 - DNA, 72 bp, Artificial Sequence
  Description of Artificial Sequence: Synthetic oligonucleotide
  modified_base (37)..(37): a, c, t or g
cctgaagatattgcaacatattactgtcagcagbhcnhcaatctcccttwcacttttggcggagggaccaag

SEQ ID NO: 1666 - DNA, 72 bp, Artificial Sequence
  Description of Artificial Sequence: Synthetic oligonucleotide
  modified_base (40)..(40): a, c, t or g
cctgaagatattgcaacatattactgtcagcagbhcgatnhcctcccttwcacttttggcggagggaccaag

SEQ ID NO: 1667 - DNA, 72 bp, Artificial Sequence
  Description of Artificial Sequence: Synthetic oligonucleotide
cctgaagatattgcaacatattactgtcagcagbhcgataatywcccttwcacttttggcggagggaccaag

SEQ ID NO: 1668 - DNA, 72 bp, Artificial Sequence
  Description of Artificial Sequence: Synthetic oligonucleotide
  modified_base (37)..(37): a, c, t or g
  modified_base (40)..(40): a, c, t or g
cctgaagatattgcaacatattactgtcagcagtacnhcnhcctcccttwcacttttggcggagggaccaag

SEQ ID NO: 1669 - DNA, 72 bp, Artificial Sequence
  Description of Artificial Sequence: Synthetic oligonucleotide
  modified_base (37)..(37): a, c, t or g
cctgaagatattgcaacatattactgtcagcagtacnhcaatywcccttwcacttttggcggagggaccaag

SEQ ID NO: 1670 - DNA, 72 bp, Artificial Sequence
  Description of Artificial Sequence: Synthetic oligonucleotide
  modified_base (40)..(40): a, c, t or g
cctgaagatattgcaacatattactgtcagcagtacgatnhcywcccttwcacttttggcggagggaccaag

SEQ ID NO: 1671 - DNA, 72 bp, Artificial Sequence
  Description of Artificial Sequence: Synthetic oligonucleotide
cctgaagatattgcaacatattactgtswmcagbhcgataatctcccttwcacttttggcggagggaccaag

SEQ ID NO: 1672 - DNA, 72 bp, Artificial Sequence
  Description of Artificial Sequence: Synthetic oligonucleotide
  modified_base (37)..(37): a, c, t or g
cctgaagatattgcaacatattactgtswmcagtacnhcaatctcccttwcacttttggcggagggaccaag

SEQ ID NO: 1673 - DNA, 72 bp, Artificial Sequence
  Description of Artificial Sequence: Synthetic oligonucleotide
  modified_base (40)..(40): a, c, t or g
cctgaagatattgcaacatattactgtswmcagtacgatnhcctcccttwcacttttggcggagggaccaag

SEQ ID NO: 1674 - DNA, 72 bp, Artificial Sequence
  Description of Artificial Sequence: Synthetic oligonucleotide
cctgaagatattgcaacatattactgtswmcagtacgataatywcccttwcacttttggcggagggaccaag

SEQ ID NO: 1675 - DNA, 72 bp, Artificial Sequence
  Description of Artificial Sequence: Synthetic oligonucleotide
cctgaagatattgcaacatattactgtcagswmbhcgataatctcccttwcacttttggcggagggaccaag

SEQ ID NO: 1676 - DNA, 72 bp, Artificial Sequence
  Description of Artificial Sequence: Synthetic oligonucleotide
  modified_base (37)..(37): a, c, t or g
cctgaagatattgcaacatattactgtcagswmtacnhcaatctcccttwcacttttggcggagggaccaag

SEQ ID NO: 1677 - DNA, 72 bp, Artificial Sequence
  Description of Artificial Sequence: Synthetic oligonucleotide
  modified_base (40)..(40): a, c, t or g
cctgaagatattgcaacatattactgtcagswmtacgatnhcctcccttwcacttttggcggagggaccaag

SEQ ID NO: 1678 - DNA, 72 bp, Artificial Sequence
  Description of Artificial Sequence: Synthetic oligonucleotide
cctgaagatattgcaacatattactgtcagswmtacgataatywcccttwcacttttggcggagggaccaag

SEQ ID NO: 1679 - DNA, 72 bp, Artificial Sequence
  Description of Artificial Sequence: Synthetic oligonucleotide
cctgaagatattgcaacatattactgtswmswmtacgataatctccctmtcacttttggcggagggaccaag

SEQ ID NO: 1680 - DNA, 72 bp, Artificial Sequence
  Description of Artificial Sequence: Synthetic oligonucleotide
  modified_base (37)..(37): a, c, t or g
cctgaagatattgcaacatattactgtcagcagbhcnhcaatctccctmtcacttttggcggagggaccaag

SEQ ID NO: 1681 - DNA, 72 bp, Artificial Sequence
  Description of Artificial Sequence: Synthetic oligonucleotide
  modified_base (40)..(40): a, c, t or g
cctgaagatattgcaacatattactgtcagcagbhcgatnhcctccctmtcacttttggcggagggaccaag

SEQ ID NO: 1682 - DNA, 72 bp, Artificial Sequence
  Description of Artificial Sequence: Synthetic oligonucleotide
cctgaagatattgcaacatattactgtcagcagbhcgataatywccctmtcacttttggcggagggaccaag

SEQ ID NO: 1683 - DNA, 72 bp, Artificial Sequence
  Description of Artificial Sequence: Synthetic oligonucleotide
  modified_base (37)..(37): a, c, t or g
  modified_base (40)..(40): a, c, t or g
cctgaagatattgcaacatattactgtcagcagtacnhcnhcctccctmtcacttttggcggagggaccaag

SEQ ID NO: 1684 - DNA, 72 bp, Artificial Sequence
  Description of Artificial Sequence: Synthetic oligonucleotide
  modified_base (37)..(37): a, c, t or g
cctgaagatattgcaacatattactgtcagcagtacnhcaatywccctmtcacttttggcggagggaccaag

SEQ ID NO: 1685 - DNA, 72 bp, Artificial Sequence
  Description of Artificial Sequence: Synthetic oligonucleotide
  modified_base (40)..(40): a, c, t or g
cctgaagatattgcaacatattactgtcagcagtacgatnhcywccctmtcacttttggcggagggaccaag

SEQ ID NO: 1686 - DNA, 72 bp, Artificial Sequence
  Description of Artificial Sequence: Synthetic oligonucleotide
cctgaagatattgcaacatattactgtswmcagbhcgataatctccctmtcacttttggcggagggaccaag

SEQ ID NO: 1687 - DNA, 72 bp, Artificial Sequence
  Description of Artificial Sequence: Synthetic oligonucleotide
  modified_base (37)..(37): a, c, t or g
cctgaagatattgcaacatattactgtswmcagtacnhcaatctccctmtcacttttggcggagggaccaag

SEQ ID NO: 1688 - DNA, 72 bp, Artificial Sequence
  Description of Artificial Sequence: Synthetic oligonucleotide
  modified_base (40)..(40): a, c, t or g
cctgaagatattgcaacatattactgtswmcagtacgatnhcctccctmtcacttttggcggagggaccaag

SEQ ID NO: 1689 - DNA, 72 bp, Artificial Sequence
  Description of Artificial Sequence: Synthetic oligonucleotide
cctgaagatattgcaacatattactgtswmcagtacgataatywccctmtcacttttggcggagggaccaag

SEQ ID NO: 1690 - DNA, 72 bp, Artificial Sequence
  Description of Artificial Sequence: Synthetic oligonucleotide
cctgaagatattgcaacatattactgtcagswmbhcgataatctccctmtcacttttggcggagggaccaag

SEQ ID NO: 1691 - DNA, 72 bp, Artificial Sequence
  Description of Artificial Sequence: Synthetic oligonucleotide
  modified_base (37)..(37): a, c, t or g
cctgaagatattgcaacatattactgtcagswmtacnhcaatctccctmtcacttttggcggagggaccaag

SEQ ID NO: 1692 - DNA, 72 bp, Artificial Sequence
  Description of Artificial Sequence: Synthetic oligonucleotide
  modified_base (40)..(40): a, c, t or g
cctgaagatattgcaacatattactgtcagswmtacgatnhcctccctmtcacttttggcggagggaccaag

SEQ ID NO: 1693 - DNA, 72 bp, Artificial Sequence
  Description of Artificial Sequence: Synthetic oligonucleotide
cctgaagatattgcaacatattactgtcagswmtacgataatywccctmtcacttttggcggagggaccaag

SEQ ID NO: 1694 - DNA, 72 bp, Artificial Sequence
  Description of Artificial Sequence: Synthetic oligonucleotide
cctgaagatattgcaacatattactgtswmswmtacgataatctccctwggacttttggcggagggaccaag

SEQ ID NO: 1695 - DNA, 72 bp, Artificial Sequence
  Description of Artificial Sequence: Synthetic oligonucleotide
  modified_base (37)..(37): a, c, t or g
cctgaagatattgcaacatattactgtcagcagbhcnhcaatctccctwggacttttggcggagggaccaag

SEQ ID NO: 1696 - DNA, 72 bp, Artificial Sequence
  Description of Artificial Sequence: Synthetic oligonucleotide
  modified_base (40)..(40): a, c, t or g
cctgaagatattgcaacatattactgtcagcagbhcgatnhcctccctwggacttttggcggagggaccaag

SEQ ID NO: 1697 - DNA, 72 bp, Artificial Sequence
  Description of Artificial Sequence: Synthetic oligonucleotide
cctgaagatattgcaacatattactgtcagcagbhcgataatywccctwggacttttggcggagggaccaag

SEQ ID NO: 1698 - DNA, 72 bp, Artificial Sequence
  Description of Artificial Sequence: Synthetic oligonucleotide
  modified_base (37)..(37): a, c, t or g
  modified_base (40)..(40): a, c, t or g
cctgaagatattgcaacatattactgtcagcagtacnhcnhcctccctwggacttttggcggagggaccaag

SEQ ID NO: 1699 - DNA, 72 bp, Artificial Sequence
  Description of Artificial Sequence: Synthetic oligonucleotide
  modified_base (37)..(37): a, c, t or g
cctgaagatattgcaacatattactgtcagcagtacnhcaatywccctwggacttttggcggagggaccaag

SEQ ID NO: 1700 - DNA, 72 bp, Artificial Sequence
  Description of Artificial Sequence: Synthetic oligonucleotide
  modified_base (40)..(40): a, c, t or g
cctgaagatattgcaacatattactgtcagcagtacgatnhcywccctwggacttttggcggagggaccaag

SEQ ID NO: 1701 - DNA, 72 bp, Artificial Sequence
  Description of Artificial Sequence: Synthetic oligonucleotide
cctgaagatattgcaacatattactgtswmcagbhcgataatctccctwggacttttggcggagggaccaag

SEQ ID NO: 1702 - DNA, 72 bp, Artificial Sequence
  Description of Artificial Sequence: Synthetic oligonucleotide
  modified_base (37)..(37): a, c, t or g
cctgaagatattgcaacatattactgtswmcagtacnhcaatctccctwggacttttggcggagggaccaag

SEQ ID NO: 1703 - DNA, 72 bp, Artificial Sequence
  Description of Artificial Sequence: Synthetic oligonucleotide
  modified_base (40)..(40): a, c, t or g
cctgaagatattgcaacatattactgtswmcagtacgatnhcctccctwggacttttggcggagggaccaag

SEQ ID NO: 1704 - DNA, 72 bp, Artificial Sequence
  Description of Artificial Sequence: Synthetic oligonucleotide
cctgaagatattgcaacatattactgtswmcagtacgataatywccctwggacttttggcggagggaccaag

SEQ ID NO: 1705 - DNA, 72 bp, Artificial Sequence
  Description of Artificial Sequence: Synthetic oligonucleotide
cctgaagatattgcaacatattactgtcagswmbhcgataatctccctwggacttttggcggagggaccaag

SEQ ID NO: 1706 - DNA, 72 bp, Artificial Sequence
  Description of Artificial Sequence: Synthetic oligonucleotide
  modified_base (37)..(37): a, c, t or g
cctgaagatattgcaacatattactgtcagswmtacnhcaatctccctwggacttttggcggagggaccaag

SEQ ID NO: 1707 - DNA, 72 bp, Artificial Sequence
  Description of Artificial Sequence: Synthetic oligonucleotide
  modified_base (40)..(40): a, c, t or g
cctgaagatattgcaacatattactgtcagswmtacgatnhcctccctwggacttttggcggagggaccaag

SEQ ID NO: 1708 - DNA, 72 bp, Artificial Sequence
  Description of Artificial Sequence: Synthetic oligonucleotide
cctgaagatattgcaacatattactgtcagswmtacgataatywccctwggacttttggcggagggaccaag

SEQ ID NO: 1709 - DNA, 72 bp, Artificial Sequence
  Description of Artificial Sequence: Synthetic oligonucleotide
cctgaagatattgcaacatattactgtswmswmtacgataatctccctcctacttttggcggagggaccaag

SEQ ID NO: 1710 - DNA, 72 bp, Artificial Sequence
  Description of Artificial Sequence: Synthetic oligonucleotide
  modified_base (37)..(37): a, c, t or g
cctgaagatattgcaacatattactgtcagcagbhcnhcaatctccctcctacttttggcggagggaccaag

SEQ ID NO: 1711 - DNA, 72 bp, Artificial Sequence
  Description of Artificial Sequence: Synthetic oligonucleotide
  modified_base (40)..(40): a, c, t or g
cctgaagatattgcaacatattactgtcagcagbhcgatnhcctccctcctacttttggcggagggaccaag

SEQ ID NO: 1712 - DNA, 72 bp, Artificial Sequence
  Description of Artificial Sequence: Synthetic oligonucleotide
cctgaagatattgcaacatattactgtcagcagbhcgataatywccctcctacttttggcggagggaccaag

SEQ ID NO: 1713 - DNA, 72 bp, Artificial Sequence
  Description of Artificial Sequence: Synthetic oligonucleotide
  modified_base (37)..(37): a, c, t or g
  modified_base (40)..(40): a, c, t or g
cctgaagatattgcaacatattactgtcagcagtacnhcnhcctccctcctacttttggcggagggaccaag

SEQ ID NO: 1714 - DNA, 72 bp, Artificial Sequence
  Description of Artificial Sequence: Synthetic oligonucleotide
  modified_base (37)..(37): a, c, t or g
cctgaagatattgcaacatattactgtcagcagtacnhcaatywccctcctacttttggcggagggaccaag

SEQ ID NO: 1715 - DNA, 72 bp, Artificial Sequence
  Description of Artificial Sequence: Synthetic oligonucleotide
  modified_base (40)..(40): a, c, t or g
cctgaagatattgcaacatattactgtcagcagtacgatnhcywccctcctacttttggcggagggaccaag

SEQ ID NO: 1716 - DNA, 72 bp, Artificial Sequence
  Description of Artificial Sequence: Synthetic oligonucleotide
cctgaagatattgcaacatattactgtswmcagbhcgataatctccctcctacttttggcggagggaccaag

SEQ ID NO: 1717 - DNA, 72 bp, Artificial Sequence
  Description of Artificial Sequence: Synthetic oligonucleotide
  modified_base (37)..(37): a, c, t or g
cctgaagatattgcaacatattactgtswmcagtacnhcaatctccctcctacttttggcggagggaccaag

SEQ ID NO: 1718 - DNA, 72 bp, Artificial Sequence
  Description of Artificial Sequence: Synthetic oligonucleotide
  modified_base (40)..(40): a, c, t or g
cctgaagatattgcaacatattactgtswmcagtacgatnhcctccctcctacttttggcggagggaccaag

SEQ ID NO: 1719 - DNA, 72 bp, Artificial Sequence
  Description of Artificial Sequence: Synthetic oligonucleotide
cctgaagatattgcaacatattactgtswmcagtacgataatywccctcctacttttggcggagggaccaag

SEQ ID NO: 1720 - DNA, 72 bp, Artificial Sequence
  Description of Artificial Sequence: Synthetic oligonucleotide
cctgaagatattgcaacatattactgtcagswmbhcgataatctccctcctacttttggcggagggaccaag

SEQ ID NO: 1721 - DNA, 72 bp, Artificial Sequence
  Description of Artificial Sequence: Synthetic oligonucleotide
  modified_base (37)..(37): a, c, t or g
cctgaagatattgcaacatattactgtcagswmtacnhcaatctccctcctacttttggcggagggaccaag

SEQ ID NO: 1722 - DNA, 72 bp, Artificial Sequence
  Description of Artificial Sequence: Synthetic oligonucleotide
  modified_base (40)..(40): a, c, t or g
cctgaagatattgcaacatattactgtcagswmtacgatnhcctccctcctacttttggcggagggaccaag

SEQ ID NO: 1723 - DNA, 72 bp, Artificial Sequence
  Description of Artificial Sequence: Synthetic oligonucleotide
cctgaagatattgcaacatattactgtcagswmtacgataatywccctcctacttttggcggagggaccaag

SEQ ID NO: 1724 - DNA, 72 bp, Artificial Sequence
  Description of Artificial Sequence: Synthetic oligonucleotide
cctgaagattttgcaacttactactgtswmswmagctacagtactccttwcacttttggcggagggaccaag

SEQ ID NO: 1725 - DNA, 72 bp, Artificial Sequence
  Description of Artificial Sequence: Synthetic oligonucleotide
  modified_base (35)..(35): a, c, t or g
cctgaagattttgcaacttactactgtcagcaavnabhcagtactccttwcacttttggcggagggaccaag

SEQ ID NO: 1726 - DNA, 72 bp, Artificial Sequence
  Description of Artificial Sequence: Synthetic oligonucleotide
  modified_base (35)..(35): a, c, t or g
  modified_base (40)..(40): a, c, t or g
cctgaagattttgcaacttactactgtcagcaavnatacnhcactccttwcacttttggcggagggaccaag

SEQ ID NO: 1727 - DNA, 72 bp, Artificial Sequence
  Description of Artificial Sequence: Synthetic oligonucleotide
  modified_base (35)..(35): a, c, t or g
cctgaagattttgcaacttactactgtcagcaavnatacagtbhcccttwcacttttggcggagggaccaag

SEQ ID NO: 1728 - DNA, 72 bp, Artificial Sequence
  Description of Artificial Sequence: Synthetic oligonucleotide
  modified_base (40)..(40): a, c, t or g
cctgaagattttgcaacttactactgtcagcaaagcbhcnhcactccttwcacttttggcggagggaccaag

SEQ ID NO: 1729 - DNA, 72 bp, Artificial Sequence
  Description of Artificial Sequence: Synthetic oligonucleotide
cctgaagattttgcaacttactactgtcagcaaagcbhcagtbhcccttwcacttttggcggagggaccaag

SEQ ID NO: 1730 - DNA, 72 bp, Artificial Sequence
  Description of Artificial Sequence: Synthetic oligonucleotide
  modified_base (40)..(40): a, c, t or g
cctgaagattttgcaacttactactgtcagcaaagctacnhcbhcccttwcacttttggcggagggaccaag

SEQ ID NO: 1731 - DNA, 72 bp, Artificial Sequence
  Description of Artificial Sequence: Synthetic oligonucleotide
  modified_base (35)..(35): a, c, t or g
cctgaagattttgcaacttactactgtswmcaavnatacagtactccttwcacttttggcggagggaccaag

SEQ ID NO: 1732 - DNA, 72 bp, Artificial Sequence
  Description of Artificial Sequence: Synthetic oligonucleotide
cctgaagattttgcaacttactactgtswmcaaagcbhcagtactccttwcacttttggcggagggaccaag

SEQ ID NO: 1733 - DNA, 72 bp, Artificial Sequence
  Description of Artificial Sequence: Synthetic oligonucleotide
  modified_base (40)..(40): a, c, t or g
cctgaagattttgcaacttactactgtswmcaaagctacnhcactccttwcacttttggcggagggaccaag

SEQ ID NO: 1734 - DNA, 72 bp, Artificial Sequence
  Description of Artificial Sequence: Synthetic oligonucleotide
cctgaagattttgcaacttactactgtswmcaaagctacagtbhcccttwcacttttggcggagggaccaag

SEQ ID NO: 1735 - DNA, 72 bp, Artificial Sequence
  Description of Artificial Sequence: Synthetic oligonucleotide
  modified_base (35)..(35): a, c, t or g
cctgaagattttgcaacttactactgtcagswmvnatacagtactccttwcacttttggcggagggaccaag

SEQ ID NO: 1736 - DNA, 72 bp, Artificial Sequence
  Description of Artificial Sequence: Synthetic oligonucleotide
cctgaagattttgcaacttactactgtcagswmagcbhcagtactccttwcacttttggcggagggaccaag

SEQ ID NO: 1737 - DNA, 72 bp, Artificial Sequence
  Description of Artificial Sequence: Synthetic oligonucleotide
  modified_base (40)..(40): a, c, t or g
cctgaagattttgcaacttactactgtcagswmagctacnhcactccttwcacttttggcggagggaccaag

SEQ ID NO: 1738 - DNA, 72 bp, Artificial Sequence
  Description of Artificial Sequence: Synthetic oligonucleotide
cctgaagattttgcaacttactactgtcagswmagctacagtbhcccttwcacttttggcggagggaccaag

SEQ ID NO: 1739 - DNA, 72 bp, Artificial Sequence
  Description of Artificial Sequence: Synthetic oligonucleotide
cctgaagattttgcaacttactactgtswmswmagctacagtactcctmtcacttttggcggagggaccaag

SEQ ID NO: 1740 - DNA, 72 bp, Artificial Sequence
  Description of Artificial Sequence: Synthetic oligonucleotide
  modified_base (35)..(35): a, c, t or g
cctgaagattttgcaacttactactgtcagcaavnabhcagtactcctmtcacttttggcggagggaccaag

SEQ ID NO: 1741 - DNA, 72 bp, Artificial Sequence
  Description of Artificial Sequence: Synthetic oligonucleotide
  modified_base (35)..(35): a, c, t or g
  modified_base (40)..(40): a, c, t or g
cctgaagattttgcaacttactactgtcagcaavnatacnhcactcctmtcacttttggcggagggaccaag

SEQ ID NO: 1742 - DNA, 72 bp, Artificial Sequence
  Description of Artificial Sequence: Synthetic oligonucleotide
  modified_base (35)..(35): a, c, t or g
cctgaagattttgcaacttactactgtcagcaavnatacagtbhccctmtcacttttggcggagggaccaag

SEQ ID NO: 1743 - DNA, 72 bp, Artificial Sequence
  Description of Artificial Sequence: Synthetic oligonucleotide
  modified_base (40)..(40): a, c, t or g
cctgaagattttgcaacttactactgtcagcaaagcbhcnhcactcctmtcacttttggcggagggaccaag

SEQ ID NO: 1744 - DNA, 72 bp, Artificial Sequence
  Description of Artificial Sequence: Synthetic oligonucleotide
cctgaagattttgcaacttactactgtcagcaaagcbhcagtbhccctmtcacttttggcggagggaccaag

SEQ ID NO: 1745 - DNA, 72 bp, Artificial Sequence
  Description of Artificial Sequence: Synthetic oligonucleotide
  modified_base (40)..(40): a, c, t or g
cctgaagattttgcaacttactactgtcagcaaagctacnhcbhccctmtcacttttggcggagggaccaag

SEQ ID NO: 1746 - DNA, 72 bp, Artificial Sequence
  Description of Artificial Sequence: Synthetic oligonucleotide
  modified_base (35)..(35): a, c, t or g
cctgaagattttgcaacttactactgtswmcaavnatacagtactcctmtcacttttggcggagggaccaag

SEQ ID NO: 1747 - DNA, 72 bp, Artificial Sequence
  Description of Artificial Sequence: Synthetic oligonucleotide
cctgaagattttgcaacttactactgtswmcaaagcbhcagtactcctmtcacttttggcggagggaccaag

SEQ ID NO: 1748 - DNA, 72 bp, Artificial Sequence
  Description of Artificial Sequence: Synthetic oligonucleotide
  modified_base (40)..(40): a, c, t or g
cctgaagattttgcaacttactactgtswmcaaagctacnhcactcctmtcacttttggcggagggaccaag

SEQ ID NO: 1749 - DNA, 72 bp, Artificial Sequence
  Description of Artificial Sequence: Synthetic oligonucleotide
cctgaagattttgcaacttactactgtswmcaaagctacagtbhccctmtcacttttggcggagggaccaag

SEQ ID NO: 1750 - DNA, 72 bp, Artificial Sequence
  Description of Artificial Sequence: Synthetic oligonucleotide
  modified_base (35)..(35): a, c, t or g
cctgaagattttgcaacttactactgtcagswmvnatacagtactcctmtcacttttggcggagggaccaag

SEQ ID NO: 1751 - DNA, 72 bp, Artificial Sequence
  Description of Artificial Sequence: Synthetic oligonucleotide
cctgaagattttgcaacttactactgtcagswmagcbhcagtactcctmtcacttttggcggagggaccaag

SEQ ID NO: 1752 - DNA, 72 bp, Artificial Sequence
  Description of Artificial Sequence: Synthetic oligonucleotide
  modified_base (40)..(40): a, c, t or g
cctgaagattttgcaacttactactgtcagswmagctacnhcactcctmtcacttttggcggagggaccaag

SEQ ID NO: 1753 - DNA, 72 bp, Artificial Sequence
  Description of Artificial Sequence: Synthetic oligonucleotide
cctgaagattttgcaacttactactgtcagswmagctacagtbhccctmtcacttttggcggagggaccaag

SEQ ID NO: 1754 - DNA, 72 bp, Artificial Sequence
  Description of Artificial Sequence: Synthetic oligonucleotide
cctgaagattttgcaacttactactgtswmswmagctacagtactcctwggacttttggcggagggaccaag

SEQ ID NO: 1755 - DNA, 72 bp, Artificial Sequence
  Description of Artificial Sequence: Synthetic oligonucleotide
  modified_base (35)..(35): a, c, t or g
cctgaagattttgcaacttactactgtcagcaavnabhcagtactcctwggacttttggcggagggaccaag

SEQ ID NO: 1756 - DNA, 72 bp, Artificial Sequence
  Description of Artificial Sequence: Synthetic oligonucleotide
  modified_base (35)..(35): a, c, t or g
  modified_base (40)..(40): a, c, t or g
cctgaagattttgcaacttactactgtcagcaavnatacnhcactcctwggacttttggcggagggaccaag

SEQ ID NO: 1757 - DNA, 72 bp, Artificial Sequence
  Description of Artificial Sequence: Synthetic oligonucleotide
  modified_base (35)..(35): a, c, t or g
cctgaagattttgcaacttactactgtcagcaavnatacagtbhccctwggacttttggcggagggaccaag

SEQ ID NO: 1758 - DNA, 72 bp, Artificial Sequence
  Description of Artificial Sequence: Synthetic oligonucleotide
  modified_base (40)..(40): a, c, t or g
cctgaagattttgcaacttactactgtcagcaaagcbhcnhcactcctwggacttttggcggagggaccaag

SEQ ID NO: 1759 - DNA, 72 bp, Artificial Sequence
  Description of Artificial Sequence: Synthetic oligonucleotide
cctgaagattttgcaacttactactgtcagcaaagcbhcagtbhccctwggacttttggcggagggaccaag

SEQ ID NO: 1760 - DNA, 72 bp, Artificial Sequence
  Description of Artificial Sequence: Synthetic oligonucleotide
  modified_base (40)..(40): a, c, t or g
cctgaagattttgcaacttactactgtcagcaaagctacnhcbhccctwggacttttggcggagggaccaag

SEQ ID NO: 1761 - DNA, 72 bp, Artificial Sequence
  Description of Artificial Sequence: Synthetic oligonucleotide
  modified_base (35)..(35): a, c, t or g
cctgaagattttgcaacttactactgtswmcaavnatacagtactcctwggacttttggcggagggaccaag

SEQ ID NO: 1762 - DNA, 72 bp, Artificial Sequence
  Description of Artificial Sequence: Synthetic oligonucleotide
cctgaagattttgcaacttactactgtswmcaaagcbhcagtactcctwggacttttggcggagggaccaag

SEQ ID NO: 1763 - DNA, 72 bp, Artificial Sequence
  Description of Artificial Sequence: Synthetic oligonucleotide
  modified_base (40)..(40): a, c, t or g
cctgaagattttgcaacttactactgtswmcaaagctacnhcactcctwggacttttggcggagggaccaag

SEQ ID NO: 1764 - DNA, 72 bp, Artificial Sequence
  Description of Artificial Sequence: Synthetic oligonucleotide
cctgaagattttgcaacttactactgtswmcaaagctacagtbhccctwggacttttggcggagggaccaag

SEQ ID NO: 1765 - DNA, 72 bp, Artificial Sequence
  Description of Artificial Sequence: Synthetic oligonucleotide
  modified_base (35)..(35): a, c, t or g
cctgaagattttgcaacttactactgtcagswmvnatacagtactcctwggacttttggcggagggaccaag

SEQ ID NO: 1766 - DNA, 72 bp, Artificial Sequence
  Description of Artificial Sequence: Synthetic oligonucleotide
cctgaagattttgcaacttactactgtcagswmagcbhcagtactcctwggacttttggcggagggaccaag

SEQ ID NO: 1767 - DNA, 72 bp, Artificial Sequence
  Description of Artificial Sequence: Synthetic oligonucleotide
  modified_base (40)..(40): a, c, t or g
cctgaagattttgcaacttactactgtcagswmagctacnhcactcctwggacttttggcggagggaccaag

SEQ ID NO: 1768 - DNA, 72 bp, Artificial Sequence
  Description of Artificial Sequence: Synthetic oligonucleotide
cctgaagattttgcaacttactactgtcagswmagctacagtbhccctwggacttttggcggagggaccaag

SEQ ID NO: 1769 - DNA, 72 bp, Artificial Sequence
  Description of Artificial Sequence: Synthetic oligonucleotide
cctgaagattttgcaacttactactgtswmswmagctacagtactcctcctacttttggcggagggaccaag

SEQ ID NO: 1770 - DNA, 72 bp, Artificial Sequence
  Description of Artificial Sequence: Synthetic oligonucleotide
  modified_base (35)..(35): a, c, t or g
cctgaagattttgcaacttactactgtcagcaavnabhcagtactcctcctacttttggcggagggaccaag

SEQ ID NO: 1771 - DNA, 72 bp, Artificial Sequence
  Description of Artificial Sequence: Synthetic oligonucleotide
  modified_base (35)..(35): a, c, t or g
  modified_base (40)..(40): a, c, t or g
cctgaagattttgcaacttactactgtcagcaavnatacnhcactcctcctacttttggcggagggaccaag

SEQ ID NO: 1772 - DNA, 72 bp, Artificial Sequence
  Description of Artificial Sequence: Synthetic oligonucleotide
  modified_base (35)..(35): a, c, t or g
cctgaagattttgcaacttactactgtcagcaavnatacagtbhccctcctacttttggcggagggaccaag

SEQ ID NO: 1773 - DNA, 72 bp, Artificial Sequence
  Description of Artificial Sequence: Synthetic oligonucleotide
  modified_base (40)..(40): a, c, t or g
cctgaagattttgcaacttactactgtcagcaaagcbhcnhcactcctcctacttttggcggagggaccaag

SEQ ID NO: 1774 - DNA, 72 bp, Artificial Sequence
  Description of Artificial Sequence: Synthetic oligonucleotide
cctgaagattttgcaacttactactgtcagcaaagcbhcagtbhccctcctacttttggcggagggaccaag

SEQ ID NO: 1775 - DNA, 72 bp, Artificial Sequence
  Description of Artificial Sequence: Synthetic oligonucleotide
  modified_base (40)..(40): a, c, t or g
cctgaagattttgcaacttactactgtcagcaaagctacnhcbhccctcctacttttggcggagggaccaag

SEQ ID NO: 1776 - DNA, 72 bp, Artificial Sequence
  Description of Artificial Sequence: Synthetic oligonucleotide
  modified_base (35)..(35): a, c, t or g
cctgaagattttgcaacttactactgtswmcaavnatacagtactcctcctacttttggcggagggaccaag

SEQ ID NO: 1777 - DNA, 72 bp, Artificial Sequence
  Description of Artificial Sequence: Synthetic oligonucleotide
cctgaagattttgcaacttactactgtswmcaaagcbhcagtactcctcctacttttggcggagggaccaag

SEQ ID NO: 1778 - DNA, 72 bp, Artificial Sequence
  Description of Artificial Sequence: Synthetic oligonucleotide
  modified_base (40)..(40): a, c, t or g
cctgaagattttgcaacttactactgtswmcaaagctacnhcactcctcctacttttggcggagggaccaag

SEQ ID NO: 1779 - DNA, 72 bp, Artificial Sequence
  Description of Artificial Sequence: Synthetic oligonucleotide
cctgaagattttgcaacttactactgtswmcaaagctacagtbhccctcctacttttggcggagggaccaag

SEQ ID NO: 1780 - DNA, 72 bp, Artificial Sequence
  Description of Artificial Sequence: Synthetic oligonucleotide
  modified_base (35)..(35): a, c, t or g
cctgaagattttgcaacttactactgtcagswmvnatacagtactcctcctacttttggcggagggaccaag

SEQ ID NO: 1781 - DNA, 72 bp, Artificial Sequence
  Description of Artificial Sequence: Synthetic oligonucleotide
cctgaagattttgcaacttactactgtcagswmagcbhcagtactcctcctacttttggcggagggaccaag

SEQ ID NO: 1782 - DNA, 72 bp, Artificial Sequence
  Description of Artificial Sequence: Synthetic oligonucleotide
  modified_base (40)..(40): a, c, t or g
cctgaagattttgcaacttactactgtcagswmagctacnhcactcctcctacttttggcggagggaccaag

SEQ ID NO: 1783 - DNA, 72 bp, Artificial Sequence
  Description of Artificial Sequence: Synthetic oligonucleotide
cctgaagattttgcaacttactactgtcagswmagctacagtbhccctcctacttttggcggagggaccaag

SEQ ID NO: 1784 - DNA, 72 bp, Artificial Sequence
  Description of Artificial Sequence: Synthetic oligonucleotide
gctgaggatgttggggtttattactgcdtsswmgcactccagactccttwcacttttggcggagggaccaag

SEQ ID NO: 1785 - DNA, 72 bp, Artificial Sequence
  Description of Artificial Sequence: Synthetic oligonucleotide
  modified_base (35)..(35): a, c, t or g
  modified_base (38)..(38): a, c, t or g
gctgaggatgttggggtttattactgcatgcagvnamnacagactccttwcacttttggcggagggaccaag

SEQ ID NO: 1786 - DNA, 72 bp, Artificial Sequence
  Description of Artificial Sequence: Synthetic oligonucleotide
  modified_base (35)..(35): a, c, t or g
gctgaggatgttggggtttattactgcatgcagvnactcsrmactccttwcacttttggcggagggaccaag

SEQ ID NO: 1787 - DNA, 72 bp, Artificial Sequence
  Description of Artificial Sequence: Synthetic oligonucleotide
  modified_base (35)..(35): a, c, t or g
gctgaggatgttggggtttattactgcatgcagvnactccagvbcccttwcacttttggcggagggaccaag

SEQ ID NO: 1788 - DNA, 72 bp, Artificial Sequence
  Description of Artificial Sequence: Synthetic oligonucleotide
  modified_base (38)..(38): a, c, t or g
gctgaggatgttggggtttattactgcatgcaggcamnasrmactccttwcacttttggcggagggaccaag

SEQ ID NO: 1789 - DNA, 72 bp, Artificial Sequence
  Description of Artificial Sequence: Synthetic oligonucleotide
  modified_base (38)..(38): a, c, t or g
gctgaggatgttggggtttattactgcatgcaggcamnacagvbcccttwcacttttggcggagggaccaag

SEQ ID NO: 1790 - DNA, 72 bp, Artificial Sequence
  Description of Artificial Sequence: Synthetic oligonucleotide
gctgaggatgttggggtttattactgcatgcaggcactcsrmvbcccttwcacttttggcggagggaccaag

SEQ ID NO: 1791 - DNA, 72 bp, Artificial Sequence
  Description of Artificial Sequence: Synthetic oligonucleotide
  modified_base (35)..(35): a, c, t or g
gctgaggatgttggggtttattactgcdtscagvnactccagactccttwcacttttggcggagggaccaag

SEQ ID NO: 1792 - DNA, 72 bp, Artificial Sequence
  Description of Artificial Sequence: Synthetic oligonucleotide
  modified_base (38)..(38): a, c, t or g
gctgaggatgttggggtttattactgcdtscaggcamnacagactccttwcacttttggcggagggaccaag

SEQ ID NO: 1793 - DNA, 72 bp, Artificial Sequence
  Description of Artificial Sequence: Synthetic oligonucleotide
gctgaggatgttggggtttattactgcdtscaggcactcsrmactccttwcacttttggcggagggaccaag

SEQ ID NO: 1794 - DNA, 72 bp, Artificial Sequence
  Description of Artificial Sequence: Synthetic oligonucleotide
gctgaggatgttggggtttattactgcdtscaggcactccagvbcccttwcacttttggcggagggaccaag

SEQ ID NO: 1795 - DNA, 72 bp, Artificial Sequence
  Description of Artificial Sequence: Synthetic oligonucleotide
  modified_base (35)..(35): a, c, t or g
gctgaggatgttggggtttattactgcatgswmvnactccagactccttwcacttttggcggagggaccaag

SEQ ID NO: 1796 - DNA, 72 bp, Artificial Sequence
  Description of Artificial Sequence: Synthetic oligonucleotide
  modified_base (38)..(38): a, c, t or g
gctgaggatgttggggtttattactgcatgswmgcamnacagactccttwcacttttggcggagggaccaag

SEQ ID NO: 1797 - DNA, 72 bp, Artificial Sequence
  Description of Artificial Sequence: Synthetic oligonucleotide
gctgaggatgttggggtttattactgcatgswmgcactcsrmactccttwcacttttggcggagggaccaag

SEQ ID NO: 1798 - DNA, 72 bp, Artificial Sequence
  Description of Artificial Sequence: Synthetic oligonucleotide
gctgaggatgttggggtttattactgcatgswmgcactccagvbcccttwcacttttggcggagggaccaag

SEQ ID NO: 1799 - DNA, 72 bp, Artificial Sequence
  Description of Artificial Sequence: Synthetic oligonucleotide
gctgaggatgttggggtttattactgcdtsswmgcactccagactcctmtcacttttggcggagggaccaag

SEQ ID NO: 1800 - DNA, 72 bp, Artificial Sequence
  Description of Artificial Sequence: Synthetic oligonucleotide
  modified_base (35)..(35): a, c, t or g
  modified_base (38)..(38): a, c, t or g
gctgaggatgttggggtttattactgcatgcagvnamnacagactcctmtcacttttggcggagggaccaag

SEQ ID NO: 1801 - DNA, 72 bp, Artificial Sequence
  Description of Artificial Sequence: Synthetic oligonucleotide
  modified_base (35)..(35): a, c, t or g
gctgaggatgttggggtttattactgcatgcagvnactcsrmactcctmtcacttttggcggagggaccaag

SEQ ID NO: 1802 - DNA, 72 bp, Artificial Sequence
  Description of Artificial Sequence: Synthetic oligonucleotide
  modified_base (35)..(35): a, c, t or g
gctgaggatgttggggtttattactgcatgcagvnactccagvbccctmtcacttttggcggagggaccaag

SEQ ID NO: 1803 - DNA, 72 bp, Artificial Sequence
  Description of Artificial Sequence: Synthetic oligonucleotide
  modified_base (38)..(38): a, c, t or g
gctgaggatgttggggtttattactgcatgcaggcamnasrmactcctmtcacttttggcggagggaccaag

SEQ ID NO: 1804 - DNA, 72 bp, Artificial Sequence
  Description of Artificial Sequence: Synthetic oligonucleotide
  modified_base (38)..(38): a, c, t or g
gctgaggatgttggggtttattactgcatgcaggcamnacagvbccctmtcacttttggcggagggaccaag

SEQ ID NO: 1805 - DNA, 72 bp, Artificial Sequence
  Description of Artificial Sequence: Synthetic oligonucleotide
gctgaggatgttggggtttattactgcatgcaggcactcsrmvbccctmtcacttttggcggagggaccaag

SEQ ID NO: 1806 - DNA, 72 bp, Artificial Sequence
  Description of Artificial Sequence: Synthetic oligonucleotide
  modified_base (35)..(35): a, c, t or g
gctgaggatgttggggtttattactgcdtscagvnactccagactcctmtcacttttggcggagggaccaag

SEQ ID NO: 1807 - DNA, 72 bp, Artificial Sequence
  Description of Artificial Sequence: Synthetic oligonucleotide
  modified_base (38)..(38): a, c, t or g
gctgaggatgttggggtttattactgcdtscaggcamnacagactcctmtcacttttggcggagggaccaag

SEQ ID NO: 1808 - DNA, 72 bp, Artificial Sequence
  Description of Artificial Sequence: Synthetic oligonucleotide
gctgaggatgttggggtttattactgcdtscaggcactcsrmactcctmtcacttttggcggagggaccaag

SEQ ID NO: 1809 - DNA, 72 bp, Artificial Sequence
  Description of Artificial Sequence: Synthetic oligonucleotide
gctgaggatgttggggtttattactgcdtscaggcactccagvbccctmtcacttttggcggagggaccaag

SEQ ID NO: 1810 - DNA, 72 bp, Artificial Sequence
  Description of Artificial Sequence: Synthetic oligonucleotide
  modified_base (35)..(35): a, c, t or g
gctgaggatgttggggtttattactgcatgswmvnactccagactcctmtcacttttggcggagggaccaag

SEQ ID NO: 1811 - DNA, 72 bp, Artificial Sequence
  Description of Artificial Sequence: Synthetic oligonucleotide
  modified_base (38)..(38): a, c, t or g
gctgaggatgttggggtttattactgcatgswmgcamnacagactcctmtcacttttggcggagggaccaag

SEQ ID NO: 1812 - DNA, 72 bp, Artificial Sequence
  Description of Artificial Sequence: Synthetic oligonucleotide
gctgaggatgttggggtttattactgcatgswmgcactcsrmactcctmtcacttttggcggagggaccaag

SEQ ID NO: 1813 - DNA, 72 bp, Artificial Sequence
  Description of Artificial Sequence: Synthetic oligonucleotide
gctgaggatgttggggtttattactgcatgswmgcactccagvbccctmtcacttttggcggagggaccaag

SEQ ID NO: 1814 - DNA, 72 bp, Artificial Sequence
  Description of Artificial Sequence: Synthetic oligonucleotide
gctgaggatgttggggtttattactgcdtsswmgcactccagactcctwggacttttggcggagggaccaag

SEQ ID NO: 1815 - DNA, 72 bp, Artificial Sequence
  Description of Artificial Sequence: Synthetic oligonucleotide
  modified_base (35)..(35): a, c, t or g
  modified_base (38)..(38): a, c, t or g
gctgaggatgttggggtttattactgcatgcagvnamnacagactcctwggacttttggcggagggaccaag

SEQ ID NO: 1816 - DNA, 72 bp, Artificial Sequence
  Description of Artificial Sequence: Synthetic oligonucleotide
  modified_base (35)..(35): a, c, t or g
gctgaggatgttggggtttattactgcatgcagvnactcsrmactcctwggacttttggcggagggaccaag

SEQ ID NO: 1817 - DNA, 72 bp, Artificial Sequence
  Description of Artificial Sequence: Synthetic oligonucleotide
  modified_base (35)..(35): a, c, t or g
gctgaggatgttggggtttattactgcatgcagvnactccagvbccctwggacttttggcggagggaccaag

SEQ ID NO: 1818 - DNA, 72 bp, Artificial Sequence
  Description of Artificial Sequence: Synthetic oligonucleotide
  modified_base (38)..(38): a, c, t or g
gctgaggatgttggggtttattactgcatgcaggcamnasrmactcctwggacttttggcggagggaccaag

SEQ ID NO: 1819 - DNA, 72 bp, Artificial Sequence
  Description of Artificial Sequence: Synthetic oligonucleotide
  modified_base (38)..(38): a, c, t or g
gctgaggatgttggggtttattactgcatgcaggcamnacagvbccctwggacttttggcggagggaccaag

SEQ ID NO: 1820 - DNA, 72 bp, Artificial Sequence
  Description of Artificial Sequence: Synthetic oligonucleotide
gctgaggatgttggggtttattactgcatgcaggcactcsrmvbccctwggacttttggcggagggaccaag

SEQ ID NO: 1821 - DNA, 72 bp, Artificial Sequence
  Description of Artificial Sequence: Synthetic oligonucleotide
  modified_base (35)..(35): a, c, t or g
gctgaggatgttggggtttattactgcdtscagvnactccagactcctwggacttttggcggagggaccaag

SEQ ID NO: 1822 - DNA, 72 bp, Artificial Sequence
  Description of Artificial Sequence: Synthetic oligonucleotide
  modified_base (38)..(38): a, c, t or g
gctgaggatgttggggtttattactgcdtscaggcamnacagactcctwggacttttggcggagggaccaag

SEQ ID NO: 1823 - DNA, 72 bp, Artificial Sequence
  Description of Artificial Sequence: Synthetic oligonucleotide
gctgaggatgttggggtttattactgcdtscaggcactcsrmactcctwggacttttggcggagggaccaag

SEQ ID NO: 1824 - DNA, 72 bp, Artificial Sequence
  Description of Artificial Sequence: Synthetic oligonucleotide
gctgaggatgttggggtttattactgcdtscaggcactccagvbccctwggacttttggcggagggaccaag

SEQ ID NO: 1825 - DNA, 72 bp, Artificial Sequence
  Description of Artificial Sequence: Synthetic oligonucleotide
  modified_base (35)..(35): a, c, t or g
gctgaggatgttggggtttattactgcatgswmvnactccagactcctwggacttttggcggagggaccaag

SEQ ID NO: 1826 - DNA, 72 bp, Artificial Sequence
  Description of Artificial Sequence: Synthetic oligonucleotide
  modified_base (38)..(38): a, c, t or g
gctgaggatgttggggtttattactgcatgswmgcamnacagactcctwggacttttggcggagggaccaag

SEQ ID NO: 1827 - DNA, 72 bp, Artificial Sequence
  Description of Artificial Sequence: Synthetic oligonucleotide
gctgaggatgttggggtttattactgcatgswmgcactcsrmactcctwggacttttggcggagggaccaag

SEQ ID NO: 1828 - DNA, 72 bp, Artificial Sequence
  Description of Artificial Sequence: Synthetic oligonucleotide
gctgaggatgttggggtttattactgcatgswmgcactccagvbccctwggacttttggcggagggaccaag

SEQ ID NO: 1829 - DNA, 72 bp, Artificial Sequence
  Description of Artificial Sequence: Synthetic oligonucleotide
gctgaggatgttggggtttattactgcdtsswmgcactccagactcctcctacttttggcggagggaccaag

SEQ ID NO: 1830 - DNA, 72 bp, Artificial Sequence
  Description of Artificial Sequence: Synthetic oligonucleotide
  modified_base (35)..(35): a, c, t or g
  modified_base (38)..(38): a, c, t or g
gctgaggatgttggggtttattactgcatgcagvnamnacagactcctcctacttttggcggagggaccaag

SEQ ID NO: 1831 - DNA, 72 bp, Artificial Sequence
  Description of Artificial Sequence: Synthetic oligonucleotide
  modified_base (35)..(35): a, c, t or g
gctgaggatgttggggtttattactgcatgcagvnactcsrmactcctcctacttttggcggagggaccaag

SEQ ID NO: 1832 - DNA, 72 bp, Artificial Sequence
  Description of Artificial Sequence: Synthetic oligonucleotide
  modified_base (35)..(35): a, c, t or g
gctgaggatgttggggtttattactgcatgcagvnactccagvbccctcctacttttggcggagggaccaag

SEQ ID NO: 1833 - DNA, 72 bp, Artificial Sequence
  Description of Artificial Sequence: Synthetic oligonucleotide
  modified_base (38)..(38): a, c, t or g
gctgaggatgttggggtttattactgcatgcaggcamnasrmactcctcctacttttggcggagggaccaag

SEQ ID NO: 1834 - DNA, 72 bp, Artificial Sequence
  Description of Artificial Sequence: Synthetic oligonucleotide
  modified_base (38)..(38): a, c, t or g
gctgaggatgttggggtttattactgcatgcaggcamnacagvbccctcctacttttggcggagggaccaag

SEQ ID NO: 1835 - DNA, 72 bp, Artificial Sequence
  Description of Artificial Sequence: Synthetic oligonucleotide
gctgaggatgttggggtttattactgcatgcaggcactcsrmvbccctcctacttttggcggagggaccaag

SEQ ID NO: 1836 - DNA, 72 bp, Artificial Sequence
  Description of Artificial Sequence: Synthetic oligonucleotide
  modified_base (35)..(35): a, c, t or g
gctgaggatgttggggtttattactgcdtscagvnactccagactcctcctacttttggcggagggaccaag

SEQ ID NO: 1837 - DNA, 72 bp, Artificial Sequence
  Description of Artificial Sequence: Synthetic oligonucleotide
  modified_base (38)..(38): a, c, t or g
gctgaggatgttggggtttattactgcdtscaggcamnacagactcctcctacttttggcggagggaccaag

SEQ ID NO: 1838 - DNA, 72 bp, Artificial Sequence
  Description of Artificial Sequence: Synthetic oligonucleotide
gctgaggatgttggggtttattactgcdtscaggcactcsrmactcctcctacttttggcggagggaccaag

SEQ ID NO: 1839 - DNA, 72 bp, Artificial Sequence
  Description of Artificial Sequence: Synthetic oligonucleotide
gctgaggatgttggggtttattactgcdtscaggcactccagvbccctcctacttttggcggagggaccaag

SEQ ID NO: 1840 - DNA, 72 bp, Artificial Sequence
  Description of Artificial Sequence: Synthetic oligonucleotide
  modified_base (35)..(35): a, c, t or g
gctgaggatgttggggtttattactgcatgswmvnactccagactcctcctacttttggcggagggaccaag

SEQ ID NO: 1841 - DNA, 72 bp, Artificial Sequence
  Description of Artificial Sequence: Synthetic oligonucleotide
  modified_base (38)..(38): a, c, t or g
gctgaggatgttggggtttattactgcatgswmgcamnacagactcctcctacttttggcggagggaccaag

SEQ ID NO: 1842 - DNA, 72 bp, Artificial Sequence
  Description of Artificial Sequence: Synthetic oligonucleotide
gctgaggatgttggggtttattactgcatgswmgcactcsrmactcctcctacttttggcggagggaccaag

SEQ ID NO: 1843 - DNA, 72 bp, Artificial Sequence
  Description of Artificial Sequence: Synthetic oligonucleotide
gctgaggatgttggggtttattactgcatgswmgcactccagvbccctcctacttttggcggagggaccaag

SEQ ID NO: 1844 - DNA, 72 bp, Artificial Sequence
  Description of Artificial Sequence: Synthetic oligonucleotide
cctgaagattttgcagtttattactgtswmswmagaagtaattggccttwcacttttggcggagggaccaag

SEQ ID NO: 1845 - DNA, 72 bp, Artificial Sequence
  Description of Artificial Sequence: Synthetic oligonucleotide
  modified_base (37)..(37): a, c, t or g
cctgaagattttgcagtttattactgtcagcagbhcnhcaattggccttwcacttttggcggagggaccaag

SEQ ID NO: 1846 - DNA, 72 bp, Artificial Sequence
  Description of Artificial Sequence: Synthetic oligonucleotide
  modified_base (40)..(40): a, c, t or g
cctgaagattttgcagtttattactgtcagcagbhcagtnhctggccttwcacttttggcggagggaccaag

SEQ ID NO: 1847 - DNA, 72 bp, Artificial Sequence
  Description of Artificial Sequence: Synthetic oligonucleotide
cctgaagattttgcagtttattactgtcagcagbhcagtaatywcccttwcacttttggcggagggaccaag

SEQ ID NO: 1848 - DNA, 72 bp, Artificial Sequence
  Description of Artificial Sequence: Synthetic oligonucleotide
  modified_base (37)..(37): a, c, t or g
  modified_base (40)..(40): a, c, t or g
cctgaagattttgcagtttattactgtcagcagaganhcnhctggccttwcacttttggcggagggaccaag

SEQ ID NO: 1849 - DNA, 72 bp, Artificial Sequence
  Description of Artificial Sequence: Synthetic oligonucleotide
  modified_base (37)..(37): a, c, t or g
cctgaagattttgcagtttattactgtcagcagaganhcaatywcccttwcacttttggcggagggaccaag

SEQ ID NO: 1850 - DNA, 72 bp, Artificial Sequence
  Description of Artificial Sequence: Synthetic oligonucleotide
  modified_base (40)..(40): a, c, t or g
cctgaagattttgcagtttattactgtcagcagagaagtnhcywcccttwcacttttggcggagggaccaag

SEQ ID NO: 1851 - DNA, 72 bp, Artificial Sequence
  Description of Artificial Sequence: Synthetic oligonucleotide
cctgaagattttgcagtttattactgtswmcagbhcagtaattggccttwcacttttggcggagggaccaag

SEQ ID NO: 1852 - DNA, 72 bp, Artificial Sequence
  Description of Artificial Sequence: Synthetic oligonucleotide
  modified_base (37)..(37): a, c, t or g
cctgaagattttgcagtttattactgtswmcagaganhcaattggccttwcacttttggcggagggaccaag

SEQ ID NO: 1853 - DNA, 72 bp, Artificial Sequence
  Description of Artificial Sequence: Synthetic oligonucleotide
  modified_base (40)..(40): a, c, t or g
cctgaagattttgcagtttattactgtswmcagagaagtnhctggccttwcacttttggcggagggaccaag

SEQ ID NO: 1854 - DNA, 72 bp, Artificial Sequence
  Description of Artificial Sequence: Synthetic oligonucleotide
cctgaagattttgcagtttattactgtswmcagagaagtaatywcccttwcacttttggcggagggaccaag

SEQ ID NO: 1855 - DNA, 72 bp, Artificial Sequence
  Description of Artificial Sequence: Synthetic oligonucleotide
cctgaagattttgcagtttattactgtcagswmbhcagtaattggccttwcacttttggcggagggaccaag

SEQ ID NO: 1856 - DNA, 72 bp, Artificial Sequence
  Description of Artificial Sequence: Synthetic oligonucleotide
  modified_base (37)..(37): a, c, t or g
cctgaagattttgcagtttattactgtcagswmaganhcaattggccttwcacttttggcggagggaccaag

SEQ ID NO: 1857 - DNA, 72 bp, Artificial Sequence
  Description of Artificial Sequence: Synthetic oligonucleotide
  modified_base (40)..(40): a, c, t or g
cctgaagattttgcagtttattactgtcagswmagaagtnhctggccttwcacttttggcggagggaccaag

SEQ ID NO: 1858 - DNA, 72 bp, Artificial Sequence
  Description of Artificial Sequence: Synthetic oligonucleotide
cctgaagattttgcagtttattactgtcagswmagaagtaatywcccttwcacttttggcggagggaccaag

SEQ ID NO: 1859 - DNA, 72 bp, Artificial Sequence
  Description of Artificial Sequence: Synthetic oligonucleotide
cctgaagattttgcagtttattactgtswmswmagaagtaattggcctmtcacttttggcggagggaccaag

SEQ ID NO: 1860 - DNA, 72 bp, Artificial Sequence
  Description of Artificial Sequence: Synthetic oligonucleotide
  modified_base (37)..(37): a, c, t or g
cctgaagattttgcagtttattactgtcagcagbhcnhcaattggcctmtcacttttggcggagggaccaag

SEQ ID NO: 1861 - DNA, 72 bp, Artificial Sequence
  Description of Artificial Sequence: Synthetic oligonucleotide
  modified_base (40)..(40): a, c, t or g
cctgaagattttgcagtttattactgtcagcagbhcagtnhctggcctmtcacttttggcggagggaccaag

SEQ ID NO: 1862 - DNA, 72 bp, Artificial Sequence
  Description of Artificial Sequence: Synthetic oligonucleotide
cctgaagattttgcagtttattactgtcagcagbhcagtaatywccctmtcacttttggcggagggaccaag

SEQ ID NO: 1863 - DNA, 72 bp, Artificial Sequence
  Description of Artificial Sequence: Synthetic oligonucleotide
  modified_base (37)..(37): a, c, t or g
  modified_base (40)..(40): a, c, t or g
cctgaagattttgcagtttattactgtcagcagaganhcnhctggcctmtcacttttggcggagggaccaag

SEQ ID NO: 1864 - DNA, 72 bp, Artificial Sequence
  Description of Artificial Sequence: Synthetic oligonucleotide
  modified_base (37)..(37): a, c, t or g
cctgaagattttgcagtttattactgtcagcagaganhcaatywccctmtcacttttggcggagggaccaag

SEQ ID NO: 1865 - DNA, 72 bp, Artificial Sequence
  Description of Artificial Sequence: Synthetic oligonucleotide
  modified_base (40)..(40): a, c, t or g
cctgaagattttgcagtttattactgtcagcagagaagtnhcywccctmtcacttttggcggagggaccaag

SEQ ID NO: 1866 - DNA, 72 bp, Artificial Sequence
  Description of Artificial Sequence: Synthetic oligonucleotide
cctgaagattttgcagtttattactgtswmcagbhcagtaattggcctmtcacttttggcggagggaccaag

SEQ ID NO: 1867 - DNA, 72 bp, Artificial Sequence
  Description of Artificial Sequence: Synthetic oligonucleotide
  modified_base (37)..(37): a, c, t or g
cctgaagattttgcagtttattactgtswmcagaganhcaattggcctmtcacttttggcggagggaccaag

SEQ ID NO: 1868 - DNA, 72 bp, Artificial Sequence
  Description of Artificial Sequence: Synthetic oligonucleotide
  modified_base (40)..(40): a, c, t or g
cctgaagattttgcagtttattactgtswmcagagaagtnhctggcctmtcacttttggcggagggaccaag

SEQ ID NO: 1869 - DNA, 72 bp, Artificial Sequence
  Description of Artificial Sequence: Synthetic oligonucleotide
cctgaagattttgcagtttattactgtswmcagagaagtaatywccctmtcacttttggcggagggaccaag

SEQ ID NO: 1870 - DNA, 72 bp, Artificial Sequence
  Description of Artificial Sequence: Synthetic oligonucleotide
cctgaagattttgcagtttattactgtcagswmbhcagtaattggcctmtcacttttggcggagggaccaag

SEQ ID NO: 1871 - DNA, 72 bp, Artificial Sequence
  Description of Artificial Sequence: Synthetic oligonucleotide
  modified_base (37)..(37): a, c, t or g
cctgaagattttgcagtttattactgtcagswmaganhcaattggcctmtcacttttggcggagggaccaag

SEQ ID NO: 1872 - DNA, 72 bp, Artificial Sequence
  Description of Artificial Sequence: Synthetic oligonucleotide
  modified_base (40)..(40): a, c, t or g
cctgaagattttgcagtttattactgtcagswmagaagtnhctggcctmtcacttttggcggagggaccaag

SEQ ID NO: 1873 - DNA, 72 bp, Artificial Sequence
  Description of Artificial Sequence: Synthetic oligonucleotide
cctgaagattttgcagtttattactgtcagswmagaagtaatywccctmtcacttttggcggagggaccaag

SEQ ID NO: 1874 - DNA, 72 bp, Artificial Sequence
  Description of Artificial Sequence: Synthetic oligonucleotide
cctgaagattttgcagtttattactgtswmswmagaagtaattggcctwggacttttggcggagggaccaag

SEQ ID NO: 1875 - DNA, 72 bp, Artificial Sequence
  Description of Artificial Sequence: Synthetic oligonucleotide
  modified_base (37)..(37): a, c, t or g
cctgaagattttgcagtttattactgtcagcagbhcnhcaattggcctwggacttttggcggagggaccaag

SEQ ID NO: 1876 - DNA, 72 bp, Artificial Sequence
  Description of Artificial Sequence: Synthetic oligonucleotide
  modified_base (40)..(40): a, c, t or g
cctgaagattttgcagtttattactgtcagcagbhcagtnhctggcctwggacttttggcggagggaccaag

SEQ ID NO: 1877 - DNA, 72 bp, Artificial Sequence
  Description of Artificial Sequence: Synthetic oligonucleotide
cctgaagattttgcagtttattactgtcagcagbhcagtaatywccctwggacttttggcggagggaccaag

SEQ ID NO: 1878 - DNA, 72 bp, Artificial Sequence
  Description of Artificial Sequence: Synthetic oligonucleotide
  modified_base (37)..(37): a, c, t or g
  modified_base (40)..(40): a, c, t or g
cctgaagattttgcagtttattactgtcagcagaganhcnhctggcctwggacttttggcggagggaccaag

SEQ ID NO: 1879 - DNA, 72 bp, Artificial Sequence
  Description of Artificial Sequence: Synthetic oligonucleotide
  modified_base (37)..(37): a, c, t or g
cctgaagattttgcagtttattactgtcagcagaganhcaatywccctwggacttttggcggagggaccaag

SEQ ID NO: 1880 - DNA, 72 bp, Artificial Sequence
  Description of Artificial Sequence: Synthetic oligonucleotide
  modified_base (40)..(40): a, c, t or g
cctgaagattttgcagtttattactgtcagcagagaagtnhcywccctwggacttttggcggagggaccaag

SEQ ID NO: 1881 - DNA, 72 bp, Artificial Sequence
  Description of Artificial Sequence: Synthetic oligonucleotide
cctgaagattttgcagtttattactgtswmcagbhcagtaattggcctwggacttttggcggagggaccaag

SEQ ID NO: 1882 - DNA, 72 bp, Artificial Sequence
  Description of Artificial Sequence: Synthetic oligonucleotide
  modified_base (37)..(37): a, c, t or g
cctgaagattttgcagtttattactgtswmcagaganhcaattggcctwggacttttggcggagggaccaag

SEQ ID NO: 1883 - DNA, 72 bp, Artificial Sequence
  Description of Artificial Sequence: Synthetic oligonucleotide
  modified_base (40)..(40): a, c, t or g
cctgaagattttgcagtttattactgtswmcagagaagtnhctggcctwggacttttggcggagggaccaag

SEQ ID NO: 1884 - DNA, 72 bp, Artificial Sequence
  Description of Artificial Sequence: Synthetic oligonucleotide
cctgaagattttgcagtttattactgtswmcagagaagtaatywccctwggacttttggcggagggaccaag

SEQ ID NO: 1885 - DNA, 72 bp, Artificial Sequence
  Description of Artificial Sequence: Synthetic oligonucleotide
cctgaagattttgcagtttattactgtcagswmbhcagtaattggcctwggacttttggcggagggaccaag

SEQ ID NO: 1886 - DNA, 72 bp, Artificial Sequence
  Description of Artificial Sequence: Synthetic oligonucleotide
  modified_base (37)..(37): a, c, t or g
cctgaagattttgcagtttattactgtcagswmaganhcaattggcctwggacttttggcggagggaccaag

SEQ ID NO: 1887 - DNA, 72 bp, Artificial Sequence
  Description of Artificial Sequence: Synthetic oligonucleotide
  modified_base (40)..(40): a, c, t or g
cctgaagattttgcagtttattactgtcagswmagaagtnhctggcctwggacttttggcggagggaccaag

SEQ ID NO: 1888 - DNA, 72 bp, Artificial Sequence
  Description of Artificial Sequence: Synthetic oligonucleotide
cctgaagattttgcagtttattactgtcagswmagaagtaatywccctwggacttttggcggagggaccaag

SEQ ID NO: 1889 - DNA, 72 bp, Artificial Sequence
  Description of Artificial Sequence: Synthetic oligonucleotide
cctgaagattttgcagtttattactgtswmswmagaagtaattggcctcctacttttggcggagggaccaag

SEQ ID NO: 1890 - DNA, 72 bp, Artificial Sequence
  Description of Artificial Sequence: Synthetic oligonucleotide
  modified_base (37)..(37): a, c, t or g
cctgaagattttgcagtttattactgtcagcagbhcnhcaattggcctcctacttttggcggagggaccaag

SEQ ID NO: 1891 - DNA, 72 bp, Artificial Sequence
  Description of Artificial Sequence: Synthetic oligonucleotide
  modified_base (40)..(40): a, c, t or g
cctgaagattttgcagtttattactgtcagcagbhcagtnhctggcctcctacttttggcggagggaccaag

SEQ ID NO: 1892 - DNA, 72 bp, Artificial Sequence
  Description of Artificial Sequence: Synthetic oligonucleotide
cctgaagattttgcagtttattactgtcagcagbhcagtaatywccctcctacttttggcggagggaccaag

SEQ ID NO: 1893 - DNA, 72 bp, Artificial Sequence
  Description of Artificial Sequence: Synthetic oligonucleotide
  modified_base (37)..(37): a, c, t or g
  modified_base (40)..(40): a, c, t or g
cctgaagattttgcagtttattactgtcagcagaganhcnhctggcctcctacttttggcggagggaccaag

SEQ ID NO: 1894 - DNA, 72 bp, Artificial Sequence
  Description of Artificial Sequence: Synthetic oligonucleotide
  modified_base (37)..(37): a, c, t or g
cctgaagattttgcagtttattactgtcagcagaganhcaatywccctcctacttttggcggagggaccaag

SEQ ID NO: 1895 - DNA, 72 bp, Artificial Sequence
  Description of Artificial Sequence: Synthetic oligonucleotide
  modified_base (40)..(40): a, c, t or g
cctgaagattttgcagtttattactgtcagcagagaagtnhcywccctcctacttttggcggagggaccaag

SEQ ID NO: 1896 - DNA, 72 bp, Artificial Sequence
  Description of Artificial Sequence: Synthetic oligonucleotide
cctgaagattttgcagtttattactgtswmcagbhcagtaattggcctcctacttttggcggagggaccaag

SEQ ID NO: 1897 - DNA, 72 bp, Artificial Sequence
  Description of Artificial Sequence: Synthetic oligonucleotide
  modified_base (37)..(37): a, c, t or g
cctgaagattttgcagtttattactgtswmcagaganhcaattggcctcctacttttggcggagggaccaag

SEQ ID NO: 1898 - DNA, 72 bp, Artificial Sequence
  Description of Artificial Sequence: Synthetic oligonucleotide
  modified_base (40)..(40): a, c, t or g
cctgaagattttgcagtttattactgtswmcagagaagtnhctggcctcctacttttggcggagggaccaag

SEQ ID NO: 1899 - DNA, 72 bp, Artificial Sequence
  Description of Artificial Sequence: Synthetic oligonucleotide
cctgaagattttgcagtttattactgtswmcagagaagtaatywccctcctacttttggcggagggaccaag

SEQ ID NO: 1900 - DNA, 72 bp, Artificial Sequence
  Description of Artificial Sequence: Synthetic oligonucleotide
cctgaagattttgcagtttattactgtcagswmbhcagtaattggcctcctacttttggcggagggaccaag

SEQ ID NO: 1901 - DNA, 72 bp, Artificial Sequence
  Description of Artificial Sequence: Synthetic oligonucleotide
  modified_base (37)..(37): a, c, t or g
cctgaagattttgcagtttattactgtcagswmaganhcaattggcctcctacttttggcggagggaccaag

SEQ ID NO: 1902 - DNA, 72 bp, Artificial Sequence
  Description of Artificial Sequence: Synthetic oligonucleotide
  modified_base (40)..(40): a, c, t or g
cctgaagattttgcagtttattactgtcagswmagaagtnhctggcctcctacttttggcggagggaccaag

SEQ ID NO: 1903 - DNA, 72 bp, Artificial Sequence
  Description of Artificial Sequence: Synthetic oligonucleotide
cctgaagattttgcagtttattactgtcagswmagaagtaatywccctcctacttttggcggagggaccaag

SEQ ID NO: 1904 - DNA, 75 bp, Artificial Sequence
  Description of Artificial Sequence: Synthetic oligonucleotide
cagtctgaagattttgcagtttattactgtswmswmtacaataattggccttwcacttttggcggagggaccaag

SEQ ID NO: 1905 - DNA, 75 bp, Artificial Sequence
  Description of Artificial Sequence: Synthetic oligonucleotide
  modified_base (40)..(40): a, c, t or g
cagtctgaagattttgcagtttattactgtcagcagbhcnhcaattggccttwcacttttggcggagggaccaag

SEQ ID NO: 1906 - DNA, 75 bp, Artificial Sequence
  Description of Artificial Sequence: Synthetic oligonucleotide
  modified_base (43)..(43): a, c, t or g
cagtctgaagattttgcagtttattactgtcagcagbhcaatnhctggccttwcacttttggcggagggaccaag

SEQ ID NO: 1907 - DNA, 75 bp, Artificial Sequence
  Description of Artificial Sequence: Synthetic oligonucleotide
cagtctgaagattttgcagtttattactgtcagcagbhcaataatywcccttwcacttttggcggagggaccaag

SEQ ID NO: 1908 - DNA, 75 bp, Artificial Sequence
  Description of Artificial Sequence: Synthetic oligonucleotide
  modified_base (40)..(40): a, c, t or g
  modified_base (43)..(43): a, c, t or g
cagtctgaagattttgcagtttattactgtcagcagtacnhcnhctggccttwcacttttggcggagggaccaag

SEQ ID NO: 1909 - DNA, 75 bp, Artificial Sequence
  Description of Artificial Sequence: Synthetic oligonucleotide
  modified_base (40)..(40): a, c, t or g
cagtctgaagattttgcagtttattactgtcagcagtacnhcaatywcccttwcacttttggcggagggaccaag

SEQ ID NO: 1910 - DNA, 75 bp, Artificial Sequence
  Description of Artificial Sequence: Synthetic oligonucleotide
  modified_base (43)..(43): a, c, t or g
cagtctgaagattttgcagtttattactgtcagcagtacaatnhcywcccttwcacttttggcggagggaccaag

SEQ ID NO: 1911 - DNA, 75 bp, Artificial Sequence
  Description of Artificial Sequence: Synthetic oligonucleotide
cagtctgaagattttgcagtttattactgtswmcagbhcaataattggccttwcacttttggcggagggaccaag

SEQ ID NO: 1912 - DNA, 75 bp, Artificial Sequence
  Description of Artificial Sequence: Synthetic oligonucleotide
  modified_base (40)..(40): a, c, t or g
cagtctgaagattttgcagtttattactgtswmcagtacnhcaattggccttwcacttttggcggagggaccaag

SEQ ID NO: 1913 - DNA, 75 bp, Artificial Sequence
  Description of Artificial Sequence: Synthetic oligonucleotide
  modified_base (43)..(43): a, c, t or g
cagtctgaagattttgcagtttattactgtswmcagtacaatnhctggccttwcacttttggcggagggaccaag

SEQ ID NO: 1914 - DNA, 75 bp, Artificial Sequence
  Description of Artificial Sequence: Synthetic oligonucleotide
cagtctgaagattttgcagtttattactgtswmcagtacaataatywcccttwcacttttggcggagggaccaag

SEQ ID NO: 1915 - DNA, 75 bp, Artificial Sequence
  Description of Artificial Sequence: Synthetic oligonucleotide
cagtctgaagattttgcagtttattactgtcagswmbhcaataattggccttwcacttttggcggagggaccaag

SEQ ID NO: 1916 - DNA, 75 bp, Artificial Sequence
  Description of Artificial Sequence: Synthetic oligonucleotide
  modified_base (40)..(40): a, c, t or g
cagtctgaagattttgcagtttattactgtcagswmtacnhcaattggccttwcacttttggcggagggaccaag

SEQ ID NO: 1917 - DNA, 75 bp, Artificial Sequence
  Description of Artificial Sequence: Synthetic oligonucleotide
  modified_base (43)..(43): a, c, t or g
cagtctgaagattttgcagtttattactgtcagswmtacaatnhctggccttwcacttttggcggagggaccaag

SEQ ID NO: 1918 - DNA, 75 bp, Artificial Sequence
  Description of Artificial Sequence: Synthetic oligonucleotide
cagtctgaagattttgcagtttattactgtcagswmtacaataatywcccttwcacttttggcggagggaccaag

SEQ ID NO: 1919 - DNA, 75 bp, Artificial Sequence
  Description of Artificial Sequence: Synthetic oligonucleotide
cagtctgaagattttgcagtttattactgtswmswmtacaataattggcctmtcacttttggcggagggaccaag

SEQ ID NO: 1920 - DNA, 75 bp, Artificial Sequence
  Description of Artificial Sequence: Synthetic oligonucleotide
  modified_base (40)..(40): a, c, t or g
cagtctgaagattttgcagtttattactgtcagcagbhcnhcaattggcctmtcacttttggcggagggaccaag

SEQ ID NO: 1921 - DNA, 75 bp, Artificial Sequence
  Description of Artificial Sequence: Synthetic oligonucleotide
  modified_base (43)..(43): a, c, t or g
cagtctgaagattttgcagtttattactgtcagcagbhcaatnhctggcctmtcacttttggcggagggaccaag

SEQ ID NO: 1922 - DNA, 75 bp, Artificial Sequence
  Description of Artificial Sequence: Synthetic oligonucleotide
cagtctgaagattttgcagtttattactgtcagcagbhcaataatywccctmtcacttttggcggagggaccaag

SEQ ID NO: 1923 - DNA, 75 bp, Artificial Sequence
  Description of Artificial Sequence: Synthetic oligonucleotide
  modified_base (40)..(40): a, c, t or g
  modified_base (43)..(43): a, c, t or g
cagtctgaagattttgcagtttattactgtcagcagtacnhcnhctggcctmtcacttttggcggagggaccaag

SEQ ID NO: 1924 - DNA, 75 bp, Artificial Sequence
  Description of Artificial Sequence: Synthetic oligonucleotide
  modified_base (40)..(40): a, c, t or g
cagtctgaagattttgcagtttattactgtcagcagtacnhcaatywccctmtcacttttggcggagggaccaag

SEQ ID NO: 1925 - DNA, 75 bp, Artificial Sequence
  Description of Artificial Sequence: Synthetic oligonucleotide
  modified_base (43)..(43): a, c, t or g
cagtctgaagattttgcagtttattactgtcagcagtacaatnhcywccctmtcacttttggcggagggaccaag

SEQ ID NO: 1926 - DNA, 75 bp, Artificial Sequence
  Description of Artificial Sequence: Synthetic oligonucleotide
cagtctgaagattttgcagtttattactgtswmcagbhcaataattggcctmtcacttttggcggagggaccaag

SEQ ID NO: 1927 - DNA, 75 bp, Artificial Sequence
  Description of Artificial Sequence: Synthetic oligonucleotide
  modified_base (40)..(40): a, c, t or g
cagtctgaagattttgcagtttattactgtswmcagtacnhcaattggcctmtcacttttggcggagggaccaag

SEQ ID NO: 1928 - DNA, 75 bp, Artificial Sequence
  Description of Artificial Sequence: Synthetic oligonucleotide
  modified_base (43)..(43): a, c, t or g
cagtctgaagattttgcagtttattactgtswmcagtacaatnhctggcctmtcacttttggcggagggaccaag

SEQ ID NO: 1929 - DNA, 75 bp, Artificial Sequence
  Description of Artificial Sequence: Synthetic oligonucleotide
cagtctgaagattttgcagtttattactgtswmcagtacaataatywccctmtcacttttggcggagggaccaag

SEQ ID NO: 1930 - DNA, 75 bp, Artificial Sequence
  Description of Artificial Sequence: Synthetic oligonucleotide
cagtctgaagattttgcagtttattactgtcagswmbhcaataattggcctmtcacttttggcggagggaccaag

SEQ ID NO: 1931 - DNA, 75 bp, Artificial Sequence
  Description of Artificial Sequence: Synthetic oligonucleotide
  modified_base (40)..(40): a, c, t or g
cagtctgaagattttgcagtttattactgtcagswmtacnhcaattggcctmtcacttttggcggagggaccaag

SEQ ID NO: 1932 - DNA, 75 bp, Artificial Sequence
  Description of Artificial Sequence: Synthetic oligonucleotide
  modified_base (43)..(43): a, c, t or g
cagtctgaagattttgcagtttattactgtcagswmtacaatnhctggcctmtcacttttggcggagggaccaag

SEQ ID NO: 1933 - DNA, 75 bp, Artificial Sequence
  Description of Artificial Sequence: Synthetic oligonucleotide
cagtctgaagattttgcagtttattactgtcagswmtacaataatywccctmtcacttttggcggagggaccaag

SEQ ID NO: 1934 - DNA, 75 bp, Artificial Sequence
  Description of Artificial Sequence: Synthetic oligonucleotide
cagtctgaagattttgcagtttattactgtswmswmtacaataattggcctwggacttttggcggagggaccaag

SEQ ID NO: 1935 - DNA, 75 bp, Artificial Sequence
  Description of Artificial Sequence: Synthetic oligonucleotide
  modified_base (40)..(40): a, c, t or g
cagtctgaagattttgcagtttattactgtcagcagbhcnhcaattggcctwggacttttggcggagggaccaag

SEQ ID NO: 1936 - DNA, 75 bp, Artificial Sequence
  Description of Artificial Sequence: Synthetic oligonucleotide
  modified_base (43)..(43): a, c, t or g
cagtctgaagattttgcagtttattactgtcagcagbhcaatnhctggcctwggacttttggcggagggaccaag

SEQ ID NO: 1937 - DNA, 75 bp, Artificial Sequence
  Description of Artificial Sequence: Synthetic oligonucleotide
cagtctgaagattttgcagtttattactgtcagcagbhcaataatywccctwggacttttggcggagggaccaag

SEQ ID NO: 1938 - DNA, 75 bp, Artificial Sequence
  Description of Artificial Sequence: Synthetic oligonucleotide
  modified_base (40)..(40): a, c, t or g
  modified_base (43)..(43): a, c, t or g
cagtctgaagattttgcagtttattactgtcagcagtacnhcnhctggcctwggacttttggcggagggaccaag

SEQ ID NO: 1939 - DNA, 75 bp, Artificial Sequence
  Description of Artificial Sequence: Synthetic oligonucleotide
  modified_base (40)..(40): a, c, t or g
cagtctgaagattttgcagtttattactgtcagcagtacnhcaatywccctwggacttttggcggagggaccaag

SEQ ID NO: 1940 - DNA, 75 bp, Artificial Sequence
  Description of Artificial Sequence: Synthetic oligonucleotide
  modified_base (43)..(43): a, c, t or g
cagtctgaagattttgcagtttattactgtcagcagtacaatnhcywccctwggacttttggcggagggaccaag

SEQ ID NO: 1941 - DNA, 75 bp, Artificial Sequence
  Description of Artificial Sequence: Synthetic oligonucleotide
cagtctgaagattttgcagtttattactgtswmcagbhcaataattggcctwggacttttggcggagggaccaag

SEQ ID NO: 1942 - DNA, 75 bp, Artificial Sequence
  Description of Artificial Sequence: Synthetic oligonucleotide
  modified_base (40)..(40): a, c, t or g
cagtctgaagattttgcagtttattactgtswmcagtacnhcaattggcctwggacttttggcggagggaccaag

SEQ ID NO: 1943 - DNA, 75 bp, Artificial Sequence
  Description of Artificial Sequence: Synthetic oligonucleotide
  modified_base (43)..(43): a, c, t or g
cagtctgaagattttgcagtttattactgtswmcagtacaatnhctggcctwggacttttggcggagggaccaag

SEQ ID NO: 1944 - DNA, 75 bp, Artificial Sequence
  Description of Artificial Sequence: Synthetic oligonucleotide
cagtctgaagattttgcagtttattactgtswmcagtacaataatywccctwggacttttggcggagggaccaag

SEQ ID NO: 1945 - DNA, 75 bp, Artificial Sequence
  Description of Artificial Sequence: Synthetic oligonucleotide
cagtctgaagattttgcagtttattactgtcagswmbhcaataattggcctwggacttttggcggagggaccaag

SEQ ID NO: 1946 - DNA, 75 bp, Artificial Sequence
  Description of Artificial Sequence: Synthetic oligonucleotide
  modified_base (40)..(40): a, c, t or g
cagtctgaagattttgcagtttattactgtcagswmtacnhcaattggcctwggacttttggcggagggaccaag

SEQ ID NO: 1947 - DNA, 75 bp, Artificial Sequence
  Description of Artificial Sequence: Synthetic oligonucleotide
  modified_base (43)..(43): a, c, t or g
cagtctgaagattttgcagtttattactgtcagswmtacaatnhctggcctwggacttttggcggagggaccaag

SEQ ID NO: 1948 - DNA, 75 bp, Artificial Sequence
  Description of Artificial Sequence: Synthetic oligonucleotide
cagtctgaagattttgcagtttattactgtcagswmtacaataatywccctwggacttttggcggagggaccaag

SEQ ID NO: 1949 - DNA, 75 bp, Artificial Sequence
  Description of Artificial Sequence: Synthetic oligonucleotide
cagtctgaagattttgcagtttattactgtswmswmtacaataattggcctcctacttttggcggagggaccaag

SEQ ID NO: 1950 - DNA, 75 bp, Artificial Sequence
  Description of Artificial Sequence: Synthetic oligonucleotide
  modified_base (40)..(40): a, c, t or g
cagtctgaagattttgcagtttattactgtcagcagbhcnhcaattggcctcctacttttggcggagggaccaag

SEQ ID NO: 1951 - DNA, 75 bp, Artificial Sequence
  Description of Artificial Sequence: Synthetic oligonucleotide
  modified_base (43)..(43): a, c, t or g
cagtctgaagattttgcagtttattactgtcagcagbhcaatnhctggcctcctacttttggcggagggaccaag

SEQ ID NO: 1952 - DNA, 75 bp, Artificial Sequence
  Description of Artificial Sequence: Synthetic oligonucleotide
cagtctgaagattttgcagtttattactgtcagcagbhcaataatywccctcctacttttggcggagggaccaag

SEQ ID NO: 1953 - DNA, 75 bp, Artificial Sequence
  Description of Artificial Sequence: Synthetic oligonucleotide
  modified_base (40)..(40): a, c, t or g
  modified_base (43)..(43): a, c, t or g
cagtctgaagattttgcagtttattactgtcagcagtacnhcnhctggcctcctacttttggcggagggaccaag

SEQ ID NO: 1954 - DNA, 75 bp, Artificial Sequence
  Description of Artificial Sequence: Synthetic oligonucleotide
  modified_base (40)..(40): a, c, t or g
cagtctgaagattttgcagtttattactgtcagcagtacnhcaatywccctcctacttttggcggagggaccaag

SEQ ID NO: 1955 - DNA, 75 bp, Artificial Sequence
  Description of Artificial Sequence: Synthetic oligonucleotide
  modified_base (43)..(43): a, c, t or g
cagtctgaagattttgcagtttattactgtcagcagtacaatnhcywccctcctacttttggcggagggaccaag

SEQ ID NO: 1956 - DNA, 75 bp, Artificial Sequence
  Description of Artificial Sequence: Synthetic oligonucleotide
cagtctgaagattttgcagtttattactgtswmcagbhcaataattggcctcctacttttggcggagggaccaag

SEQ ID NO: 1957 - DNA, 75 bp, Artificial Sequence
  Description of Artificial Sequence: Synthetic oligonucleotide
  modified_base (40)..(40): a, c, t or g
cagtctgaagattttgcagtttattactgtswmcagtacnhcaattggcctcctacttttggcggagggaccaag

SEQ ID NO: 1958 - DNA, 75 bp, Artificial Sequence
  Description of Artificial Sequence: Synthetic oligonucleotide
  modified_base (43)..(43): a, c, t or g
cagtctgaagattttgcagtttattactgtswmcagtacaatnhctggcctcctacttttggcggagggaccaag

SEQ ID NO: 1959 - DNA, 75 bp, Artificial Sequence
  Description of Artificial Sequence: Synthetic oligonucleotide
cagtctgaagattttgcagtttattactgtswmcagtacaataatywccctcctacttttggcggagggaccaag

SEQ ID NO: 1960 - DNA, 75 bp, Artificial Sequence
  Description of Artificial Sequence: Synthetic oligonucleotide
cagtctgaagattttgcagtttattactgtcagswmbhcaataattggcctcctacttttggcggagggaccaag

SEQ ID NO: 1961 - DNA, 75 bp, Artificial Sequence
  Description of Artificial Sequence: Synthetic oligonucleotide
  modified_base (40)..(40): a, c, t or g
cagtctgaagattttgcagtttattactgtcagswmtacnhcaattggcctcctacttttggcggagggaccaag

SEQ ID NO: 1962 - DNA, 75 bp, Artificial Sequence
  Description of Artificial Sequence: Synthetic oligonucleotide
  modified_base (43)..(43): a, c, t or g
cagtctgaagattttgcagtttattactgtcagswmtacaatnhctggcctcctacttttggcggagggaccaag

SEQ ID NO: 1963 - DNA, 75 bp, Artificial Sequence
  Description of Artificial Sequence: Synthetic oligonucleotide
cagtctgaagattttgcagtttattactgtcagswmtacaataatywccctcctacttttggcggagggaccaag

SEQ ID NO: 1964 - DNA, 72 bp, Artificial Sequence
  Description of Artificial Sequence: Synthetic oligonucleotide
cctgaagattttgcagtgtattactgtswmswmtacggaagtagtccttwcacttttggcggagggaccaag

SEQ ID NO: 1965 - DNA, 72 bp, Artificial Sequence
  Description of Artificial Sequence: Synthetic oligonucleotide
cctgaagattttgcagtgtattactgtcagcagbhcbhcagtagtccttwcacttttggcggagggaccaag

SEQ ID NO: 1966 - DNA, 72 bp, Artificial Sequence
  Description of Artificial Sequence: Synthetic oligonucleotide
  modified_base (41)..(41): a, c, t or g
cctgaagattttgcagtgtattactgtcagcagbhcggavncagtccttwcacttttggcggagggaccaag

SEQ ID NO: 1967 - DNA, 72 bp, Artificial Sequence
  Description of Artificial Sequence: Synthetic oligonucleotide
cctgaagattttgcagtgtattactgtcagcagbhcggaagtbhcccttwcacttttggcggagggaccaag

SEQ ID NO: 1968 - DNA, 72 bp, Artificial Sequence
  Description of Artificial Sequence: Synthetic oligonucleotide
  modified_base (41)..(41): a, c, t or g
cctgaagattttgcagtgtattactgtcagcagtacbhcvncagtccttwcacttttggcggagggaccaag

SEQ ID NO: 1969 - DNA, 72 bp, Artificial Sequence
  Description of Artificial Sequence: Synthetic oligonucleotide
cctgaagattttgcagtgtattactgtcagcagtacbhcagtbhcccttwcacttttggcggagggaccaag

SEQ ID NO: 1970 - DNA, 72 bp, Artificial Sequence
  Description of Artificial Sequence: Synthetic oligonucleotide
  modified_base (41)..(41): a, c, t or g
cctgaagattttgcagtgtattactgtcagcagtacggavncbhcccttwcacttttggcggagggaccaag

SEQ ID NO: 1971 - DNA, 72 bp, Artificial Sequence
  Description of Artificial Sequence: Synthetic oligonucleotide
cctgaagattttgcagtgtattactgtswmcagbhcggaagtagtccttwcacttttggcggagggaccaag

SEQ ID NO: 1972 - DNA, 72 bp, Artificial Sequence
  Description of Artificial Sequence: Synthetic oligonucleotide
cctgaagattttgcagtgtattactgtswmcagtacbhcagtagtccttwcacttttggcggagggaccaag

SEQ ID NO: 1973 - DNA, 72 bp, Artificial Sequence
  Description of Artificial Sequence: Synthetic oligonucleotide
  modified_base (41)..(41): a, c, t or g
cctgaagattttgcagtgtattactgtswmcagtacggavncagtccttwcacttttggcggagggaccaag

SEQ ID NO: 1974 - DNA, 72 bp, Artificial Sequence
  Description of Artificial Sequence: Synthetic oligonucleotide
cctgaagattttgcagtgtattactgtswmcagtacggaagtbhcccttwcacttttggcggagggaccaag

SEQ ID NO: 1975 - DNA, 72 bp, Artificial Sequence
  Description of Artificial Sequence: Synthetic oligonucleotide
cctgaagattttgcagtgtattactgtcagswmbhcggaagtagtccttwcacttttggcggagggaccaag

SEQ ID NO: 1976 - DNA, 72 bp, Artificial Sequence
  Description of Artificial Sequence: Synthetic oligonucleotide
cctgaagattttgcagtgtattactgtcagswmtacbhcagtagtccttwcacttttggcggagggaccaag

SEQ ID NO: 1977 - DNA, 72 bp, Artificial Sequence
  Description of Artificial Sequence: Synthetic oligonucleotide
  modified_base (41)..(41): a, c, t or g
cctgaagattttgcagtgtattactgtcagswmtacggavncagtccttwcacttttggcggagggaccaag

SEQ ID NO: 1978 - DNA, 72 bp, Artificial Sequence
  Description of Artificial Sequence: Synthetic oligonucleotide
cctgaagattttgcagtgtattactgtcagswmtacggaagtbhcccttwcacttttggcggagggaccaag

SEQ ID NO: 1979 - DNA, 72 bp, Artificial Sequence
  Description of Artificial Sequence: Synthetic oligonucleotide
cctgaagattttgcagtgtattactgtswmswmtacggaagtagtcctmtcacttttggcggagggaccaag

SEQ ID NO: 1980 - DNA, 72 bp, Artificial Sequence
  Description of Artificial Sequence: Synthetic oligonucleotide
cctgaagattttgcagtgtattactgtcagcagbhcbhcagtagtcctmtcacttttggcggagggaccaag

SEQ ID NO: 1981 - DNA, 72 bp, Artificial Sequence
  Description of Artificial Sequence: Synthetic oligonucleotide
  modified_base (41)..(41): a, c, t or g
cctgaagattttgcagtgtattactgtcagcagbhcggavncagtcctmtcacttttggcggagggaccaag

SEQ ID NO: 1982 - DNA, 72 bp, Artificial Sequence
  Description of Artificial Sequence: Synthetic oligonucleotide
cctgaagattttgcagtgtattactgtcagcagbhcggaagtbhccctmtcacttttggcggagggaccaag

SEQ ID NO: 1983 - DNA, 72 bp, Artificial Sequence
  Description of Artificial Sequence: Synthetic oligonucleotide
  modified_base (41)..(41): a, c, t or g
cctgaagattttgcagtgtattactgtcagcagtacbhcvncagtcctmtcacttttggcggagggaccaag

SEQ ID NO: 1984 - DNA, 72 bp, Artificial Sequence
  Description of Artificial Sequence: Synthetic oligonucleotide
cctgaagattttgcagtgtattactgtcagcagtacbhcagtbhccctmtcacttttggcggagggaccaag

SEQ ID NO: 1985 - DNA, 72 bp, Artificial Sequence
  Description of Artificial Sequence: Synthetic oligonucleotide
  modified_base (41)..(41): a, c, t or g
cctgaagattttgcagtgtattactgtcagcagtacggavncbhccctmtcacttttggcggagggaccaag

SEQ ID NO: 1986 - DNA, 72 bp, Artificial Sequence
  Description of Artificial Sequence: Synthetic oligonucleotide
cctgaagattttgcagtgtattactgtswmcagbhcggaagtagtcctmtcacttttggcggagggaccaag

SEQ ID NO: 1987 - DNA, 72 bp, Artificial Sequence
  Description of Artificial Sequence: Synthetic oligonucleotide
cctgaagattttgcagtgtattactgtswmcagtacbhcagtagtcctmtcacttttggcggagggaccaag

SEQ ID NO: 1988 - DNA, 72 bp, Artificial Sequence
  Description of Artificial Sequence: Synthetic oligonucleotide
  modified_base (41)..(41): a, c, t or g
cctgaagattttgcagtgtattactgtswmcagtacggavncagtcctmtcacttttggcggagggaccaag

SEQ ID NO: 1989 - DNA, 72 bp, Artificial Sequence
  Description of Artificial Sequence: Synthetic oligonucleotide
cctgaagattttgcagtgtattactgtswmcagtacggaagtbhccctmtcacttttggcggagggaccaag

SEQ ID NO: 1990 - DNA, 72 bp, Artificial Sequence
  Description of Artificial Sequence: Synthetic oligonucleotide
cctgaagattttgcagtgtattactgtcagswmbhcggaagtagtcctmtcacttttggcggagggaccaag

SEQ ID NO: 1991 - DNA, 72 bp, Artificial Sequence
  Description of Artificial Sequence: Synthetic oligonucleotide
cctgaagattttgcagtgtattactgtcagswmtacbhcagtagtcctmtcacttttggcggagggaccaag

SEQ ID NO: 1992 - DNA, 72 bp, Artificial Sequence
  Description of Artificial Sequence: Synthetic oligonucleotide
  modified_base (41)..(41): a, c, t or g
cctgaagattttgcagtgtattactgtcagswmtacggavncagtcctmtcacttttggcggagggaccaag

SEQ ID NO: 1993 - DNA, 72 bp, Artificial Sequence
  Description of Artificial Sequence: Synthetic oligonucleotide
cctgaagattttgcagtgtattactgtcagswmtacggaagtbhccctmtcacttttggcggagggaccaag

SEQ ID NO: 1994 - DNA, 72 bp, Artificial Sequence
  Description of Artificial Sequence: Synthetic oligonucleotide
cctgaagattttgcagtgtattactgtswmswmtacggaagtagtcctwggacttttggcggagggaccaag

SEQ ID NO: 1995 - DNA, 72 bp, Artificial Sequence
  Description of Artificial Sequence: Synthetic oligonucleotide
cctgaagattttgcagtgtattactgtcagcagbhcbhcagtagtcctwggacttttggcggagggaccaag

SEQ ID NO: 1996 - DNA, 72 bp, Artificial Sequence
  Description of Artificial Sequence: Synthetic oligonucleotide
  modified_base (41)..(41): a, c, t or g
cctgaagattttgcagtgtattactgtcagcagbhcggavncagtcctwggacttttggcggagggaccaag

SEQ ID NO: 1997 - DNA, 72 bp, Artificial Sequence
  Description of Artificial Sequence: Synthetic oligonucleotide
cctgaagattttgcagtgtattactgtcagcagbhcggaagtbhccctwggacttttggcggagggaccaag

SEQ ID NO: 1998 - DNA, 72 bp, Artificial Sequence
  Description of Artificial Sequence: Synthetic oligonucleotide
  modified_base (41)..(41): a, c, t or g
cctgaagattttgcagtgtattactgtcagcagtacbhcvncagtcctwggacttttggcggagggaccaag

SEQ ID NO: 1999 - DNA, 72 bp, Artificial Sequence
  Description of Artificial Sequence: Synthetic oligonucleotide
cctgaagattttgcagtgtattactgtcagcagtacbhcagtbhccctwggacttttggcggagggaccaag

SEQ ID NO: 2000 - DNA, 72 bp, Artificial Sequence
  Description of Artificial Sequence: Synthetic oligonucleotide
  modified_base (41)..(41): a, c, t or g
cctgaagattttgcagtgtattactgtcagcagtacggavncbhccctwggacttttggcggagggaccaag

SEQ ID NO: 2001 - DNA, 72 bp, Artificial Sequence
  Description of Artificial Sequence: Synthetic oligonucleotide
cctgaagattttgcagtgtattactgtswmcagbhcggaagtagtcctwggacttttggcggagggaccaag

SEQ ID NO: 2002 - DNA, 72 bp, Artificial Sequence
  Description of Artificial Sequence: Synthetic oligonucleotide
cctgaagattttgcagtgtattactgtswmcagtacbhcagtagtcctwggacttttggcggagggaccaag

SEQ ID NO: 2003 - DNA, 72 bp, Artificial Sequence
  Description of Artificial Sequence: Synthetic oligonucleotide
  modified_base (41)..(41): a, c, t or g
cctgaagattttgcagtgtattactgtswmcagtacggavncagtcctwggacttttggcggagggaccaag

SEQ ID NO: 2004 - DNA, 72 bp, Artificial Sequence
  Description of Artificial Sequence: Synthetic oligonucleotide
cctgaagattttgcagtgtattactgtswmcagtacggaagtbhccctwggacttttggcggagggaccaag

SEQ ID NO: 2005 - DNA, 72 bp, Artificial Sequence
  Description of Artificial Sequence: Synthetic oligonucleotide
cctgaagattttgcagtgtattactgtcagswmbhcggaagtagtcctwggacttttggcggagggaccaag

SEQ ID NO: 2006 - DNA, 72 bp, Artificial Sequence
  Description of Artificial Sequence: Synthetic oligonucleotide
cctgaagattttgcagtgtattactgtcagswmtacbhcagtagtcctwggacttttggcggagggaccaag

SEQ ID NO: 2007 - DNA, 72 bp, Artificial Sequence
  Description of Artificial Sequence: Synthetic oligonucleotide
  modified_base (41)..(41): a, c, t or g
cctgaagattttgcagtgtattactgtcagswmtacggavncagtcctwggacttttggcggagggaccaag

SEQ ID NO: 2008 - DNA, 72 bp, Artificial Sequence
  Description of Artificial Sequence: Synthetic oligonucleotide
cctgaagattttgcagtgtattactgtcagswmtacggaagtbhccctwggacttttggcggagggaccaag

SEQ ID NO: 2009 - DNA, 72 bp, Artificial Sequence
  Description of Artificial Sequence: Synthetic oligonucleotide
cctgaagattttgcagtgtattactgtswmswmtacggaagtagtcctcctacttttggcggagggaccaag

SEQ ID NO: 2010 - DNA, 72 bp, Artificial Sequence
  Description of Artificial Sequence: Synthetic oligonucleotide
cctgaagattttgcagtgtattactgtcagcagbhcbhcagtagtcctcctacttttggcggagggaccaag

SEQ ID NO: 2011 - DNA, 72 bp, Artificial Sequence
  Description of Artificial Sequence: Synthetic oligonucleotide
  modified_base (41)..(41): a, c, t or g
cctgaagattttgcagtgtattactgtcagcagbhcggavncagtcctcctacttttggcggagggaccaag

SEQ ID NO: 2012 - DNA, 72 bp, Artificial Sequence
  Description of Artificial Sequence: Synthetic oligonucleotide
cctgaagattttgcagtgtattactgtcagcagbhcggaagtbhccctcctacttttggcggagggaccaag

SEQ ID NO: 2013 - DNA, 72 bp, Artificial Sequence
  Description of Artificial Sequence: Synthetic oligonucleotide
  modified_base (41)..(41): a, c, t or g
cctgaagattttgcagtgtattactgtcagcagtacbhcvncagtcctcctacttttggcggagggaccaag

SEQ ID NO: 2014 - DNA, 72 bp, Artificial Sequence
  Description of Artificial Sequence: Synthetic oligonucleotide
cctgaagattttgcagtgtattactgtcagcagtacbhcagtbhccctcctacttttggcggagggaccaag

SEQ ID NO: 2015 - DNA, 72 bp, Artificial Sequence
  Description of Artificial Sequence: Synthetic oligonucleotide
  modified_base (41)..(41): a, c, t or g
cctgaagattttgcagtgtattactgtcagcagtacggavncbhccctcctacttttggcggagggaccaag

SEQ ID NO: 2016 - DNA, 72 bp, Artificial Sequence
  Description of Artificial Sequence: Synthetic oligonucleotide
cctgaagattttgcagtgtattactgtswmcagbhcggaagtagtcctcctacttttggcggagggaccaag

SEQ ID NO: 2017 - DNA, 72 bp, Artificial Sequence
  Description of Artificial Sequence: Synthetic oligonucleotide
cctgaagattttgcagtgtattactgtswmcagtacbhcagtagtcctcctacttttggcggagggaccaag

SEQ ID NO: 2018 - DNA, 72 bp, Artificial Sequence
  Description of Artificial Sequence: Synthetic oligonucleotide
  modified_base (41)..(41): a, c, t or g
cctgaagattttgcagtgtattactgtswmcagtacggavncagtcctcctacttttggcggagggaccaag

SEQ ID NO: 2019 - DNA, 72 bp, Artificial Sequence
  Description of Artificial Sequence: Synthetic oligonucleotide
cctgaagattttgcagtgtattactgtswmcagtacggaagtbhccctcctacttttggcggagggaccaag

SEQ ID NO: 2020 - DNA, 72 bp, Artificial Sequence
  Description of Artificial Sequence: Synthetic oligonucleotide
cctgaagattttgcagtgtattactgtcagswmbhcggaagtagtcctcctacttttggcggagggaccaag

SEQ ID NO: 2021 - DNA, 72 bp, Artificial Sequence
  Description of Artificial Sequence: Synthetic oligonucleotide
cctgaagattttgcagtgtattactgtcagswmtacbhcagtagtcctcctacttttggcggagggaccaag

SEQ ID NO: 2022 - DNA, 72 bp, Artificial Sequence
  Description of Artificial Sequence: Synthetic oligonucleotide
  modified_base (41)..(41): a, c, t or g
cctgaagattttgcagtgtattactgtcagswmtacggavncagtcctcctacttttggcggagggaccaag

SEQ ID NO: 2023 - DNA, 72 bp, Artificial Sequence
  Description of Artificial Sequence: Synthetic oligonucleotide
cctgaagattttgcagtgtattactgtcagswmtacggaagtbhccctcctacttttggcggagggaccaag

SEQ ID NO: 2024 - DNA, 72 bp, Artificial Sequence
  Description of Artificial Sequence: Synthetic oligonucleotide
cctgatgattttgcaacttattactgccagcagbhcvrmmbctacycttwcacttttggcggagggaccaag

SEQ ID NO: 2025 - DNA, 72 bp, Artificial Sequence
  Description of Artificial Sequence: Synthetic oligonucleotide
cctgatgattttgcaacttattactgccagcagbhcvrmmbctacyctmtcacttttggcggagggaccaag

SEQ ID NO: 2026 - DNA, 72 bp, Artificial Sequence
  Description of Artificial Sequence: Synthetic oligonucleotide
cctgatgattttgcaacttattactgccagcagbhcvrmmbctacyctwggacttttggcggagggaccaag

SEQ ID NO: 2027 - DNA, 72 bp, Artificial Sequence
  Description of Artificial Sequence: Synthetic oligonucleotide
cctgatgattttgcaacttattactgccagcagbhcvrmmbctacyctcctacttttggcggagggaccaag

SEQ ID NO: 2028 - DNA, 72 bp, Artificial Sequence
  Description of Artificial Sequence: Synthetic oligonucleotide
cctgatgattttgcaacttattactgccagcagbhcaatmbcywcycttwcacttttggcggagggaccaag

SEQ ID NO: 2029 - DNA, 72 bp, Artificial Sequence
  Description of Artificial Sequence: Synthetic oligonucleotide
cctgatgattttgcaacttattactgccagcagbhcaatmbcywcyctmtcacttttggcggagggaccaag

SEQ ID NO: 2030 - DNA, 72 bp, Artificial Sequence
  Description of Artificial Sequence: Synthetic oligonucleotide
cctgatgattttgcaacttattactgccagcagbhcaatmbcywcyctwggacttttggcggagggaccaag

SEQ ID NO: 2031 - DNA, 72 bp, Artificial Sequence
  Description of Artificial Sequence: Synthetic oligonucleotide
cctgatgattttgcaacttattactgccagcagbhcaatmbcywcyctcctacttttggcggagggaccaag

SEQ ID NO: 2032 - DNA, 72 bp, Artificial Sequence
  Description of Artificial Sequence: Synthetic oligonucleotide
cctgatgattttgcaacttattactgccagcagbhcvrmagtywcycttwcacttttggcggagggaccaag

SEQ ID NO: 2033 - DNA, 72 bp, Artificial Sequence
  Description of Artificial Sequence: Synthetic oligonucleotide
cctgatgattttgcaacttattactgccagcagbhcvrmagtywcyctmtcacttttggcggagggaccaag

SEQ ID NO: 2034 - DNA, 72 bp, Artificial Sequence
  Description of Artificial Sequence: Synthetic oligonucleotide
cctgatgattttgcaacttattactgccagcagbhcvrmagtywcyctwggacttttggcggagggaccaag

SEQ ID NO: 2035 - DNA, 72 bp, Artificial Sequence
  Description of Artificial Sequence: Synthetic oligonucleotide
cctgatgattttgcaacttattactgccagcagbhcvrmagtywcyctcctacttttggcggagggaccaag

SEQ ID NO: 2036 - DNA, 72 bp, Artificial Sequence
  Description of Artificial Sequence: Synthetic oligonucleotide
cctgatgattttgcaacttattactgccagcagtacvrmmbcywcycttwcacttttggcggagggaccaag

SEQ ID NO: 2037 - DNA, 72 bp, Artificial Sequence
  Description of Artificial Sequence: Synthetic oligonucleotide
cctgatgattttgcaacttattactgccagcagtacvrmmbcywcyctmtcacttttggcggagggaccaag

SEQ ID NO: 2038 - DNA, 72 bp, Artificial Sequence
  Description of Artificial Sequence: Synthetic oligonucleotide
cctgatgattttgcaacttattactgccagcagtacvrmmbcywcyctwggacttttggcggagggaccaag

SEQ ID NO: 2039 - DNA, 72 bp, Artificial Sequence
  Description of Artificial Sequence: Synthetic oligonucleotide
cctgatgattttgcaacttattactgccagcagtacvrmmbcywcyctcctacttttggcggagggaccaag

SEQ ID NO: 2040 - DNA, 72 bp, Artificial Sequence
  Description of Artificial Sequence: Synthetic oligonucleotide
  modified_base (35)..(35): a, c, t or g
  modified_base (37)..(37): a, c, t or g
  modified_base (40)..(40): a, c, t or g
cctgaagattttgcaacttattactgtcagcagrnanhcnhcttcccttwcacttttggcggagggaccaag

SEQ ID NO: 2041 - DNA, 72 bp, Artificial Sequence
  Description of Artificial Sequence: Synthetic oligonucleotide
  modified_base (35)..(35): a, c, t or g
  modified_base (37)..(37): a, c, t or g
  modified_base (40)..(40): a, c, t or g
cctgaagattttgcaacttattactgtcagcagrnanhcnhcttccctmtcacttttggcggagggaccaag

SEQ ID NO: 2042 - DNA, 72 bp, Artificial Sequence
  Description of Artificial Sequence: Synthetic oligonucleotide
  modified_base (35)..(35): a, c, t or g
  modified_base (37)..(37): a, c, t or g
  modified_base (40)..(40): a, c, t or g
cctgaagattttgcaacttattactgtcagcagrnanhcnhcttccctwggacttttggcggagggaccaag

SEQ ID NO: 2043 - DNA, 72 bp, Artificial Sequence
  Description of Artificial Sequence: Synthetic oligonucleotide
  modified_base (35)..(35): a, c, t or g
  modified_base (37)..(37): a, c, t or g
  modified_base (40)..(40): a, c, t or g
cctgaagattttgcaacttattactgtcagcagrnanhcnhcttccctcctacttttggcggagggaccaag

SEQ ID NO: 2044 - DNA, 72 bp, Artificial Sequence
  Description of Artificial Sequence: Synthetic oligonucleotide
  modified_base (35)..(35): a, c, t or g
  modified_base (37)..(37): a, c, t or g
cctgaagattttgcaacttattactgtcagcagrnanhcagtywcccttwcacttttggcggagggaccaag

SEQ ID NO: 2045 - DNA, 72 bp, Artificial Sequence
  Description of Artificial Sequence: Synthetic oligonucleotide
  modified_base (35)..(35): a, c, t or g
  modified_base (37)..(37): a, c, t or g
cctgaagattttgcaacttattactgtcagcagrnanhcagtywccctmtcacttttggcggagggaccaag

SEQ ID NO: 2046 - DNA, 72 bp, Artificial Sequence
  Description of Artificial Sequence: Synthetic oligonucleotide
  modified_base (35)..(35): a, c, t or g
  modified_base (37)..(37): a, c, t or g
cctgaagattttgcaacttattactgtcagcagrnanhcagtywccctwggacttttggcggagggaccaag

SEQ ID NO: 2047 - DNA, 72 bp, Artificial Sequence
  Description of Artificial Sequence: Synthetic oligonucleotide
  modified_base (35)..(35): a, c, t or g
  modified_base (37)..(37): a, c, t or g
cctgaagattttgcaacttattactgtcagcagrnanhcagtywccctcctacttttggcggagggaccaag

SEQ ID NO: 2048 - DNA, 72 bp, Artificial Sequence
  Description of Artificial Sequence: Synthetic oligonucleotide
  modified_base (35)..(35): a, c, t or g
  modified_base (40)..(40): a, c, t or g
cctgaagattttgcaacttattactgtcagcagrnaaatnhcywcccttwcacttttggcggagggaccaag

SEQ ID NO: 2049 - DNA, 72 bp, Artificial Sequence
  Description of Artificial Sequence: Synthetic oligonucleotide
  modified_base (35)..(35): a, c, t or g
  modified_base (40)..(40): a, c, t or g
cctgaagattttgcaacttattactgtcagcagrnaaatnhcywccctmtcacttttggcggagggaccaag

SEQ ID NO: 2050 - DNA, 72 bp, Artificial Sequence
  Description of Artificial Sequence: Synthetic oligonucleotide
  modified_base (35)..(35): a, c, t or g
  modified_base (40)..(40): a, c, t or g
cctgaagattttgcaacttattactgtcagcagrnaaatnhcywccctwggacttttggcggagggaccaag

SEQ ID NO: 2051 - DNA, 72 bp, Artificial Sequence
  Description of Artificial Sequence: Synthetic oligonucleotide
  modified_base (35)..(35): a, c, t or g
  modified_base (40)..(40): a, c, t or g
cctgaagattttgcaacttattactgtcagcagrnaaatnhcywccctcctacttttggcggagggaccaag

SEQ ID NO: 2052 - DNA, 72 bp, Artificial Sequence
  Description of Artificial Sequence: Synthetic oligonucleotide
  modified_base (37)..(37): a, c, t or g
  modified_base (40)..(40): a, c, t or g
cctgaagattttgcaacttattactgtcagcaggcanhcnhcywcccttwcacttttggcggagggaccaag

SEQ ID NO: 2053 - DNA, 72 bp, Artificial Sequence
  Description of Artificial Sequence: Synthetic oligonucleotide
  modified_base (37)..(37): a, c, t or g
  modified_base (40)..(40): a, c, t or g
cctgaagattttgcaacttattactgtcagcaggcanhcnhcywccctmtcacttttggcggagggaccaag

SEQ ID NO: 2054 - DNA, 72 bp, Artificial Sequence
  Description of Artificial Sequence: Synthetic oligonucleotide
  modified_base (37)..(37): a, c, t or g
  modified_base (40)..(40): a, c, t or g
cctgaagattttgcaacttattactgtcagcaggcanhcnhcywccctwggacttttggcggagggaccaag

SEQ ID NO: 2055 - DNA, 72 bp, Artificial Sequence
  Description of Artificial Sequence: Synthetic oligonucleotide
  modified_base (37)..(37): a, c, t or g
  modified_base (40)..(40): a, c, t or g
cctgaagattttgcaacttattactgtcagcaggcanhcnhcywccctcctacttttggcggagggaccaag

SEQ ID NO: 2056 - DNA, 72 bp, Artificial Sequence
  Description of Artificial Sequence: Synthetic oligonucleotide
  modified_base (37)..(37): a, c, t or g
  modified_base (40)..(40): a, c, t or g
cctgaagatattgcaacatattactgtcagcagbhcnhcnhcctcccttwcacttttggcggagggaccaag

SEQ ID NO: 2057 - DNA, 72 bp, Artificial Sequence
  Description of Artificial Sequence: Synthetic oligonucleotide
  modified_base (37)..(37): a, c, t or g
  modified_base (40)..(40): a, c, t or g
cctgaagatattgcaacatattactgtcagcagbhcnhcnhcctccctmtcacttttggcggagggaccaag

SEQ ID NO: 2058 - DNA, 72 bp, Artificial Sequence
  Description of Artificial Sequence: Synthetic oligonucleotide
  modified_base (37)..(37): a, c, t or g
  modified_base (40)..(40): a, c, t or g
cctgaagatattgcaacatattactgtcagcagbhcnhcnhcctccctwggacttttggcggagggaccaag

SEQ ID NO: 2059 - DNA, 72 bp, Artificial Sequence
  Description of Artificial Sequence: Synthetic oligonucleotide
  modified_base (37)..(37): a, c, t or g
  modified_base (40)..(40): a, c, t or g
cctgaagatattgcaacatattactgtcagcagbhcnhcnhcctccctcctacttttggcggagggaccaag

SEQ ID NO: 2060 - DNA, 72 bp, Artificial Sequence
  Description of Artificial Sequence: Synthetic oligonucleotide
  modified_base (37)..(37): a, c, t or g
cctgaagatattgcaacatattactgtcagcagbhcnhcaatywcccttwcacttttggcggagggaccaag

SEQ ID NO: 2061 - DNA, 72 bp, Artificial Sequence
  Description of Artificial Sequence: Synthetic oligonucleotide
  modified_base (37)..(37): a, c, t or g
cctgaagatattgcaacatattactgtcagcagbhcnhcaatywccctmtcacttttggcggagggaccaag

SEQ ID NO: 2062 - DNA, 72 bp, Artificial Sequence
  Description of Artificial Sequence: Synthetic oligonucleotide
  modified_base (37)..(37): a, c, t or g
cctgaagatattgcaacatattactgtcagcagbhcnhcaatywccctwggacttttggcggagggaccaag

SEQ ID NO: 2063 - DNA, 72 bp, Artificial Sequence
  Description of Artificial Sequence: Synthetic oligonucleotide
  modified_base (37)..(37): a, c, t or g
cctgaagatattgcaacatattactgtcagcagbhcnhcaatywccctcctacttttggcggagggaccaag

SEQ ID NO: 2064 - DNA, 72 bp, Artificial Sequence
  Description of Artificial Sequence: Synthetic oligonucleotide
  modified_base (40)..(40): a, c, t or g
cctgaagatattgcaacatattactgtcagcagbhcgatnhcywcccttwcacttttggcggagggaccaag

SEQ ID NO: 2065 - DNA, 72 bp, Artificial Sequence
  Description of Artificial Sequence: Synthetic oligonucleotide
  modified_base (40)..(40): a, c, t or g
cctgaagatattgcaacatattactgtcagcagbhcgatnhcywccctmtcacttttggcggagggaccaag

SEQ ID NO: 2066 - DNA, 72 bp, Artificial Sequence
  Description of Artificial Sequence: Synthetic oligonucleotide
  modified_base (40)..(40): a, c, t or g
cctgaagatattgcaacatattactgtcagcagbhcgatnhcywccctwggacttttggcggagggaccaag

SEQ ID NO: 2067 - DNA, 72 bp, Artificial Sequence
  Description of Artificial Sequence: Synthetic oligonucleotide
  modified_base (40)..(40): a, c, t or g
cctgaagatattgcaacatattactgtcagcagbhcgatnhcywccctcctacttttggcggagggaccaag

SEQ ID NO: 2068 - DNA, 72 bp, Artificial Sequence
  Description of Artificial Sequence: Synthetic oligonucleotide
  modified_base (37)..(37): a, c, t or g
  modified_base (40)..(40): a, c, t or g
cctgaagatattgcaacatattactgtcagcagtacnhcnhcywcccttwcacttttggcggagggaccaag

SEQ ID NO: 2069 - DNA, 72 bp, Artificial Sequence
  Description of Artificial Sequence: Synthetic oligonucleotide
  modified_base (37)..(37): a, c, t or g
  modified_base (40)..(40): a, c, t or g
cctgaagatattgcaacatattactgtcagcagtacnhcnhcywccctmtcacttttggcggagggaccaag

SEQ ID NO: 2070 - DNA, 72 bp, Artificial Sequence
  Description of Artificial Sequence: Synthetic oligonucleotide
  modified_base (37)..(37): a, c, t or g
  modified_base (40)..(40): a, c, t or g
cctgaagatattgcaacatattactgtcagcagtacnhcnhcywccctwggacttttggcggagggaccaag

SEQ ID NO: 2071 - DNA, 72 bp, Artificial Sequence
  Description of Artificial Sequence: Synthetic oligonucleotide
  modified_base (37)..(37): a, c, t or g
  modified_base (40)..(40): a, c, t or g
cctgaagatattgcaacatattactgtcagcagtacnhcnhcywccctcctacttttggcggagggaccaag

SEQ ID NO: 2072 - DNA, 72 bp, Artificial Sequence
  Description of Artificial Sequence: Synthetic oligonucleotide
  modified_base (35)..(35): a, c, t or g
  modified_base (40)..(40): a, c, t or g
cctgaagattttgcaacttactactgtcagcaavnabhcnhcactccttwcacttttggcggagggaccaag

SEQ ID NO: 2073 - DNA, 72 bp, Artificial Sequence
  Description of Artificial Sequence: Synthetic oligonucleotide
  modified_base (35)..(35): a, c, t or g
  modified_base (40)..(40): a, c, t or g
cctgaagattttgcaacttactactgtcagcaavnabhcnhcactcctmtcacttttggcggagggaccaag

SEQ ID NO: 2074 - DNA, 72 bp, Artificial Sequence
  Description of Artificial Sequence: Synthetic oligonucleotide
  modified_base (35)..(35): a, c, t or g
  modified_base (40)..(40): a, c, t or g
cctgaagattttgcaacttactactgtcagcaavnabhcnhcactcctwggacttttggcggagggaccaag

SEQ ID NO: 2075 - DNA, 72 bp, Artificial Sequence
  Description of Artificial Sequence: Synthetic oligonucleotide
  modified_base (35)..(35): a, c, t or g
  modified_base (40)..(40): a, c, t or g
cctgaagattttgcaacttactactgtcagcaavnabhcnhcactcctcctacttttggcggagggaccaag

SEQ ID NO: 2076 - DNA, 72 bp, Artificial Sequence
  Description of Artificial Sequence: Synthetic oligonucleotide
  modified_base (35)..(35): a, c, t or g
cctgaagattttgcaacttactactgtcagcaavnabhcagtbhcccttwcacttttggcggagggaccaag

SEQ ID NO: 2077 - DNA, 72 bp, Artificial Sequence
  Description of Artificial Sequence: Synthetic oligonucleotide
  modified_base (35)..(35): a, c, t or g
cctgaagattttgcaacttactactgtcagcaavnabhcagtbhccctmtcacttttggcggagggaccaag

SEQ ID NO: 2078 - DNA, 72 bp, Artificial Sequence
  Description of Artificial Sequence: Synthetic oligonucleotide
  modified_base (35)..(35): a, c, t or g
cctgaagattttgcaacttactactgtcagcaavnabhcagtbhccctwggacttttggcggagggaccaag

SEQ ID NO: 2079 - DNA, 72 bp, Artificial Sequence
  Description of Artificial Sequence: Synthetic oligonucleotide
  modified_base (35)..(35): a, c, t or g
cctgaagattttgcaacttactactgtcagcaavnabhcagtbhccctcctacttttggcggagggaccaag

SEQ ID NO: 2080 - DNA, 72 bp, Artificial Sequence
  Description of Artificial Sequence: Synthetic oligonucleotide
  modified_base (35)..(35): a, c, t or g
  modified_base (40)..(40): a, c, t or g
cctgaagattttgcaacttactactgtcagcaavnatacnhcbhcccttwcacttttggcggagggaccaag

SEQ ID NO: 2081 - DNA, 72 bp, Artificial Sequence
  Description of Artificial Sequence: Synthetic oligonucleotide
  modified_base (35)..(35): a, c, t or g
  modified_base (40)..(40): a, c, t or g
cctgaagattttgcaacttactactgtcagcaavnatacnhcbhccctmtcacttttggcggagggaccaag

SEQ ID NO: 2082 - DNA, 72 bp, Artificial Sequence
  Description of Artificial Sequence: Synthetic oligonucleotide
  modified_base (35)..(35): a, c, t or g
  modified_base (40)..(40): a, c, t or g
cctgaagattttgcaacttactactgtcagcaavnatacnhcbhccctwggacttttggcggagggaccaag

SEQ ID NO: 2083 - DNA, 72 bp, Artificial Sequence
  Description of Artificial Sequence: Synthetic oligonucleotide
  modified_base (35)..(35): a, c, t or g
  modified_base (40)..(40): a, c, t or g
cctgaagattttgcaacttactactgtcagcaavnatacnhcbhccctcctacttttggcggagggaccaag

SEQ ID NO: 2084 - DNA, 72 bp, Artificial Sequence
  Description of Artificial Sequence: Synthetic oligonucleotide
  modified_base (40)..(40): a, c, t or g
cctgaagattttgcaacttactactgtcagcaaagcbhcnhcbhcccttwcacttttggcggagggaccaag

SEQ ID NO: 2085 - DNA, 72 bp, Artificial Sequence
  Description of Artificial Sequence: Synthetic oligonucleotide
  modified_base (40)..(40): a, c, t or g
cctgaagattttgcaacttactactgtcagcaaagcbhcnhcbhccctmtcacttttggcggagggaccaag

SEQ ID NO: 2086 - DNA, 72 bp, Artificial Sequence
  Description of Artificial Sequence: Synthetic oligonucleotide
  modified_base (40)..(40): a, c, t or g
cctgaagattttgcaacttactactgtcagcaaagcbhcnhcbhccctwggacttttggcggagggaccaag

SEQ ID NO: 2087 - DNA, 72 bp, Artificial Sequence
  Description of Artificial Sequence: Synthetic oligonucleotide
  modified_base (40)..(40): a, c, t or g
cctgaagattttgcaacttactactgtcagcaaagcbhcnhcbhccctcctacttttggcggagggaccaag

SEQ ID NO: 2088 - DNA, 72 bp, Artificial Sequence
  Description of Artificial Sequence: Synthetic oligonucleotide
  modified_base (35)..(35): a, c, t or g
  modified_base (38)..(38): a, c, t or g
gctgaggatgttggggtttattactgcatgcagvnamnasrmactccttwcacttttggcggagggaccaag

SEQ ID NO: 2089 - DNA, 72 bp, Artificial Sequence
  Description of Artificial Sequence: Synthetic oligonucleotide
  modified_base (35)..(35): a, c, t or g
  modified_base (38)..(38): a, c, t or g
gctgaggatgttggggtttattactgcatgcagvnamnasrmactcctmtcacttttggcggagggaccaag

SEQ ID NO: 2090 - DNA, 72 bp, Artificial Sequence
  Description of Artificial Sequence: Synthetic oligonucleotide
  modified_base (35)..(35): a, c, t or g
  modified_base (38)..(38): a, c, t or g
gctgaggatgttggggtttattactgcatgcagvnamnasrmactcctwggacttttggcggagggaccaag

SEQ ID NO: 2091 - DNA, 72 bp, Artificial Sequence
  Description of Artificial Sequence: Synthetic oligonucleotide
  modified_base (35)..(35): a, c, t or g
  modified_base (38)..(38): a, c, t or g
gctgaggatgttggggtttattactgcatgcagvnamnasrmactcctcctacttttggcggagggaccaag

SEQ ID NO: 2092 - DNA, 72 bp, Artificial Sequence
  Description of Artificial Sequence: Synthetic oligonucleotide
  modified_base (35)..(35): a, c, t or g
  modified_base (38)..(38): a, c, t or g
gctgaggatgttggggtttattactgcatgcagvnamnacagvbcccttwcacttttggcggagggaccaag

SEQ ID NO: 2093 - DNA, 72 bp, Artificial Sequence
  Description of Artificial Sequence: Synthetic oligonucleotide
  modified_base (35)..(35): a, c, t or g
  modified_base (38)..(38): a, c, t or g
gctgaggatgttggggtttattactgcatgcagvnamnacagvbccctmtcacttttggcggagggaccaag

SEQ ID NO: 2094 - DNA, 72 bp, Artificial Sequence
  Description of Artificial Sequence: Synthetic oligonucleotide
  modified_base (35)..(35): a, c, t or g
  modified_base (38)..(38): a, c, t or g
gctgaggatgttggggtttattactgcatgcagvnamnacagvbccctwggacttttggcggagggaccaag

SEQ ID NO: 2095 - DNA, 72 bp, Artificial Sequence
  Description of Artificial Sequence: Synthetic oligonucleotide
  modified_base (35)..(35): a, c, t or g
  modified_base (38)..(38): a, c, t or g
gctgaggatgttggggtttattactgcatgcagvnamnacagvbccctcctacttttggcggagggaccaag

SEQ ID NO: 2096 - DNA, 72 bp, Artificial Sequence
  Description of Artificial Sequence: Synthetic oligonucleotide
  modified_base (35)..(35): a, c, t or g
gctgaggatgttggggtttattactgcatgcagvnactcsrmvbcccttwcacttttggcggagggaccaag

SEQ ID NO: 2097 - DNA, 72 bp, Artificial Sequence
  Description of Artificial Sequence: Synthetic oligonucleotide
  modified_base (35)..(35): a, c, t or g
gctgaggatgttggggtttattactgcatgcagvnactcsrmvbccctmtcacttttggcggagggaccaag

SEQ ID NO: 2098 - DNA, 72 bp, Artificial Sequence
  Description of Artificial Sequence: Synthetic oligonucleotide
  modified_base (35)..(35): a, c, t or g
gctgaggatgttggggtttattactgcatgcagvnactcsrmvbccctwggacttttggcggagggaccaag

SEQ ID NO: 2099 - DNA, 72 bp, Artificial Sequence
  Description of Artificial Sequence: Synthetic oligonucleotide
  modified_base (35)..(35): a, c, t or g
gctgaggatgttggggtttattactgcatgcagvnactcsrmvbccctcctacttttggcggagggaccaag

SEQ ID NO: 2100 - DNA, 72 bp, Artificial Sequence
  Description of Artificial Sequence: Synthetic oligonucleotide
  modified_base (38)..(38): a, c, t or g
gctgaggatgttggggtttattactgcatgcaggcamnasrmvbcccttwcacttttggcggagggaccaag

SEQ ID NO: 2101 - DNA, 72 bp, Artificial Sequence
  Description of Artificial Sequence: Synthetic oligonucleotide
  modified_base (38)..(38): a, c, t or g
gctgaggatgttggggtttattactgcatgcaggcamnasrmvbccctmtcacttttggcggagggaccaag

SEQ ID NO: 2102 - DNA, 72 bp, Artificial Sequence
  Description of Artificial Sequence: Synthetic oligonucleotide
  modified_base (38)..(38): a, c, t or g
gctgaggatgttggggtttattactgcatgcaggcamnasrmvbccctwggacttttggcggagggaccaag

SEQ ID NO: 2103 - DNA, 72 bp, Artificial Sequence
  Description of Artificial Sequence: Synthetic oligonucleotide
  modified_base (38)..(38): a, c, t or g
gctgaggatgttggggtttattactgcatgcaggcamnasrmvbccctcctacttttggcggagggaccaag

SEQ ID NO: 2104 - DNA, 72 bp, Artificial Sequence
  Description of Artificial Sequence: Synthetic oligonucleotide
  modified_base (37)..(37): a, c, t or g
  modified_base (40)..(40): a, c, t or g
cctgaagattttgcagtttattactgtcagcagbhcnhcnhctggccttwcacttttggcggagggaccaag

SEQ ID NO: 2105 - DNA, 72 bp, Artificial Sequence
  Description of Artificial Sequence: Synthetic oligonucleotide
  modified_base (37)..(37): a, c, t or g
  modified_base (40)..(40): a, c, t or g
cctgaagattttgcagtttattactgtcagcagbhcnhcnhctggcctmtcacttttggcggagggaccaag

SEQ ID NO: 2106 - DNA, 72 bp, Artificial Sequence
  Description of Artificial Sequence: Synthetic oligonucleotide
  modified_base (37)..(37): a, c, t or g
  modified_base (40)..(40): a, c, t or g
cctgaagattttgcagtttattactgtcagcagbhcnhcnhctggcctwggacttttggcggagggaccaag

SEQ ID NO: 2107 - DNA, 72 bp, Artificial Sequence
  Description of Artificial Sequence: Synthetic oligonucleotide
  modified_base (37)..(37): a, c, t or g
  modified_base (40)..(40): a, c, t or g
cctgaagattttgcagtttattactgtcagcagbhcnhcnhctggcctcctacttttggcggagggaccaag

SEQ ID NO: 2108 - DNA, 72 bp, Artificial Sequence
  Description of Artificial Sequence: Synthetic oligonucleotide
  modified_base (37)..(37): a, c, t or g
cctgaagattttgcagtttattactgtcagcagbhcnhcaatywcccttwcacttttggcggagggaccaag

SEQ ID NO: 2109 - DNA, 72 bp, Artificial Sequence
  Description of Artificial Sequence: Synthetic oligonucleotide
  modified_base (37)..(37): a, c, t or g
cctgaagattttgcagtttattactgtcagcagbhcnhcaatywccctmtcacttttggcggagggaccaag

SEQ ID NO: 2110 - DNA, 72 bp, Artificial Sequence
  Description of Artificial Sequence: Synthetic oligonucleotide
  modified_base (37)..(37): a, c, t or g
cctgaagattttgcagtttattactgtcagcagbhcnhcaatywccctwggacttttggcggagggaccaag

SEQ ID NO: 2111 - DNA, 72 bp, Artificial Sequence
  Description of Artificial Sequence: Synthetic oligonucleotide
  modified_base (37)..(37): a, c, t or g
cctgaagattttgcagtttattactgtcagcagbhcnhcaatywccctcctacttttggcggagggaccaag

SEQ ID NO: 2112 - DNA, 72 bp, Artificial Sequence
  Description of Artificial Sequence: Synthetic oligonucleotide
  modified_base (40)..(40): a, c, t or g
cctgaagattttgcagtttattactgtcagcagbhcagtnhcywcccttwcacttttggcggagggaccaag

SEQ ID NO: 2113 - DNA, 72 bp, Artificial Sequence
  Description of Artificial Sequence: Synthetic oligonucleotide
  modified_base (40)..(40): a, c, t or g
cctgaagattttgcagtttattactgtcagcagbhcagtnhcywccctmtcacttttggcggagggaccaag

SEQ ID NO: 2114 - DNA, 72 bp, Artificial Sequence
  Description of Artificial Sequence: Synthetic oligonucleotide
  modified_base (40)..(40): a, c, t or g
cctgaagattttgcagtttattactgtcagcagbhcagtnhcywccctwggacttttggcggagggaccaag

SEQ ID NO: 2115 - DNA, 72 bp, Artificial Sequence
  Description of Artificial Sequence: Synthetic oligonucleotide
  modified_base (40)..(40): a, c, t or g
cctgaagattttgcagtttattactgtcagcagbhcagtnhcywccctcctacttttggcggagggaccaag

SEQ ID NO: 2116 - DNA, 72 bp, Artificial Sequence
  Description of Artificial Sequence: Synthetic oligonucleotide
  modified_base (37)..(37): a, c, t or g
  modified_base (40)..(40): a, c, t or g
cctgaagattttgcagtttattactgtcagcagaganhcnhcywcccttwcacttttggcggagggaccaag

SEQ ID NO: 2117 - DNA, 72 bp, Artificial Sequence
  Description of Artificial Sequence: Synthetic oligonucleotide
  modified_base (37)..(37): a, c, t or g
  modified_base (40)..(40): a, c, t or g
cctgaagattttgcagtttattactgtcagcagaganhcnhcywccctmtcacttttggcggagggaccaag

SEQ ID NO: 2118 - DNA, 72 bp, Artificial Sequence
  Description of Artificial Sequence: Synthetic oligonucleotide
  modified_base (37)..(37): a, c, t or g
  modified_base (40)..(40): a, c, t or g
cctgaagattttgcagtttattactgtcagcagaganhcnhcywccctwggacttttggcggagggaccaag

SEQ ID NO: 2119 - DNA, 72 bp, Artificial Sequence
  Description of Artificial Sequence: Synthetic oligonucleotide
  modified_base (37)..(37): a, c, t or g
  modified_base (40)..(40): a, c, t or g
cctgaagattttgcagtttattactgtcagcagaganhcnhcywccctcctacttttggcggagggaccaag

SEQ ID NO: 2120 - DNA, 75 bp, Artificial Sequence
  Description of Artificial Sequence: Synthetic oligonucleotide
  modified_base (40)..(40): a, c, t or g
  modified_base (43)..(43): a, c, t or g
cagtctgaagattttgcagtttattactgtcagcagbhcnhcnhctggccttwcacttttggcggagggaccaag

SEQ ID NO: 2121 - DNA, 75 bp, Artificial Sequence
  Description of Artificial Sequence: Synthetic oligonucleotide
  modified_base (40)..(40): a, c, t or g
  modified_base (43)..(43): a, c, t or g
cagtctgaagattttgcagtttattactgtcagcagbhcnhcnhctggcctmtcacttttggcggagggaccaag

SEQ ID NO: 2122 - DNA, 75 bp, Artificial Sequence
  Description of Artificial Sequence: Synthetic oligonucleotide
  modified_base (40)..(40): a, c, t or g
  modified_base (43)..(43): a, c, t or g
cagtctgaagattttgcagtttattactgtcagcagbhcnhcnhctggcctwggacttttggcggagggaccaag

SEQ ID NO: 2123 - DNA, 75 bp, Artificial Sequence
  Description of Artificial Sequence: Synthetic oligonucleotide
  modified_base (40)..(40): a, c, t or g
  modified_base (43)..(43): a, c, t or g
cagtctgaagattttgcagtttattactgtcagcagbhcnhcnhctggcctcctacttttggcggagggaccaag

SEQ ID NO: 2124 - DNA, 75 bp, Artificial Sequence
  Description of Artificial Sequence: Synthetic oligonucleotide
  modified_base (40)..(40): a, c, t or g
cagtctgaagattttgcagtttattactgtcagcagbhcnhcaatywcccttwcacttttggcggagggaccaag

SEQ ID NO: 2125 - DNA, 75 bp, Artificial Sequence
  Description of Artificial Sequence: Synthetic oligonucleotide
  modified_base (40)..(40): a, c, t or g
cagtctgaagattttgcagtttattactgtcagcagbhcnhcaatywccctmtcacttttggcggagggaccaag

SEQ ID NO: 2126 - DNA, 75 bp, Artificial Sequence
  Description of Artificial Sequence: Synthetic oligonucleotide
  modified_base (40)..(40): a, c, t or g
cagtctgaagattttgcagtttattactgtcagcagbhcnhcaatywccctwggacttttggcggagggaccaag

SEQ ID NO: 2127 - DNA, 75 bp, Artificial Sequence
  Description of Artificial Sequence: Synthetic oligonucleotide
  modified_base (40)..(40): a, c, t or g
cagtctgaagattttgcagtttattactgtcagcagbhcnhcaatywccctcctacttttggcggagggaccaag

SEQ ID NO: 2128 - DNA, 75 bp, Artificial Sequence
  Description of Artificial Sequence: Synthetic oligonucleotide
  modified_base (43)..(43): a, c, t or g
cagtctgaagattttgcagtttattactgtcagcagbhcaatnhcywcccttwcacttttggcggagggaccaag

SEQ ID NO: 2129 - DNA, 75 bp, Artificial Sequence
  Description of Artificial Sequence: Synthetic oligonucleotide
  modified_base (43)..(43): a, c, t or g
cagtctgaagattttgcagtttattactgtcagcagbhcaatnhcywccctmtcacttttggcggagggaccaag

SEQ ID NO: 2130 - DNA, 75 bp, Artificial Sequence
  Description of Artificial Sequence: Synthetic oligonucleotide
  modified_base (43)..(43): a, c, t or g
cagtctgaagattttgcagtttattactgtcagcagbhcaatnhcywccctwggacttttggcggagggaccaag

SEQ ID NO: 2131 - DNA, 75 bp, Artificial Sequence
  Description of Artificial Sequence: Synthetic oligonucleotide
  modified_base (43)..(43): a, c, t or g
cagtctgaagattttgcagtttattactgtcagcagbhcaatnhcywccctcctacttttggcggagggaccaag

SEQ ID NO: 2132 - DNA, 75 bp, Artificial Sequence
  Description of Artificial Sequence: Synthetic oligonucleotide
  modified_base (40)..(40): a, c, t or g
  modified_base (43)..(43): a, c, t or g
cagtctgaagattttgcagtttattactgtcagcagtacnhcnhcywcccttwcacttttggcggagggaccaag

SEQ ID NO: 2133 - DNA, 75 bp, Artificial Sequence
  Description of Artificial Sequence: Synthetic oligonucleotide
  modified_base (40)..(40): a, c, t or g
  modified_base (43)..(43): a, c, t or g
cagtctgaagattttgcagtttattactgtcagcagtacnhcnhcywccctmtcacttttggcggagggaccaag

SEQ ID NO: 2134 - DNA, 75 bp, Artificial Sequence
  Description of Artificial Sequence: Synthetic oligonucleotide
  modified_base (40)..(40): a, c, t or g
  modified_base (43)..(43): a, c, t or g
cagtctgaagattttgcagtttattactgtcagcagtacnhcnhcywccctwggacttttggcggagggaccaag

SEQ ID NO: 2135 - DNA, 75 bp, Artificial Sequence
  Description of Artificial Sequence: Synthetic oligonucleotide
  modified_base (40)..(40): a, c, t or g
  modified_base (43)..(43): a, c, t or g
cagtctgaagattttgcagtttattactgtcagcagtacnhcnhcywccctcctacttttggcggagggaccaag

SEQ ID NO: 2136 - DNA, 72 bp, Artificial Sequence
  Description of Artificial Sequence: Synthetic oligonucleotide
  modified_base (41)..(41): a, c, t or g
cctgaagattttgcagtgtattactgtcagcagbhcbhcvncagtccttwcacttttggcggagggaccaag

SEQ ID NO: 2137 - DNA, 72 bp, Artificial Sequence
  Description of Artificial Sequence: Synthetic oligonucleotide
  modified_base (41)..(41): a, c, t or g
cctgaagattttgcagtgtattactgtcagcagbhcbhcvncagtcctmtcacttttggcggagggaccaag

SEQ ID NO: 2138 - DNA, 72 bp, Artificial Sequence
  Description of Artificial Sequence: Synthetic oligonucleotide
  modified_base (41)..(41): a, c, t or g
cctgaagattttgcagtgtattactgtcagcagbhcbhcvncagtcctwggacttttggcggagggaccaag

SEQ ID NO: 2139 - DNA, 72 bp, Artificial Sequence
  Description of Artificial Sequence: Synthetic oligonucleotide
  modified_base (41)..(41): a, c, t or g
cctgaagattttgcagtgtattactgtcagcagbhcbhcvncagtcctcctacttttggcggagggaccaag

SEQ ID NO: 2140 - DNA, 72 bp, Artificial Sequence
  Description of Artificial Sequence: Synthetic oligonucleotide
cctgaagattttgcagtgtattactgtcagcagbhcbhcagtbhcccttwcacttttggcggagggaccaag

SEQ ID NO: 2141 - DNA, 72 bp, Artificial Sequence
  Description of Artificial Sequence: Synthetic oligonucleotide
cctgaagattttgcagtgtattactgtcagcagbhcbhcagtbhccctmtcacttttggcggagggaccaag

SEQ ID NO: 2142 - DNA, 72 bp, Artificial Sequence
  Description of Artificial Sequence: Synthetic oligonucleotide
cctgaagattttgcagtgtattactgtcagcagbhcbhcagtbhccctwggacttttggcggagggaccaag

SEQ ID NO: 2143 - DNA, 72 bp, Artificial Sequence
  Description of Artificial Sequence: Synthetic oligonucleotide
cctgaagattttgcagtgtattactgtcagcagbhcbhcagtbhccctcctacttttggcggagggaccaag

SEQ ID NO: 2144 - DNA, 72 bp, Artificial Sequence
  Description of Artificial Sequence: Synthetic oligonucleotide
  modified_base (41)..(41): a, c, t or g
cctgaagattttgcagtgtattactgtcagcagbhcggavncbhcccttwcacttttggcggagggaccaag

SEQ ID NO: 2145 - DNA, 72 bp, Artificial Sequence
  Description of Artificial Sequence: Synthetic oligonucleotide
  modified_base (41)..(41): a, c, t or g
cctgaagattttgcagtgtattactgtcagcagbhcggavncbhccctmtcacttttggcggagggaccaag

SEQ ID NO: 2146 - DNA, 72 bp, Artificial Sequence
  Description of Artificial Sequence: Synthetic oligonucleotide
  modified_base (41)..(41): a, c, t or g
cctgaagattttgcagtgtattactgtcagcagbhcggavncbhccctwggacttttggcggagggaccaag

SEQ ID NO: 2147 - DNA, 72 bp, Artificial Sequence
  Description of Artificial Sequence: Synthetic oligonucleotide
  modified_base (41)..(41): a, c, t or g
cctgaagattttgcagtgtattactgtcagcagbhcggavncbhccctcctacttttggcggagggaccaag

SEQ ID NO: 2148 - DNA, 72 bp, Artificial Sequence
  Description of Artificial Sequence: Synthetic oligonucleotide
  modified_base (41)..(41): a, c, t or g
cctgaagattttgcagtgtattactgtcagcagtacbhcvncbhcccttwcacttttggcggagggaccaag

SEQ ID NO: 2149 - DNA, 72 bp, Artificial Sequence
  Description of Artificial Sequence: Synthetic oligonucleotide
  modified_base (41)..(41): a, c, t or g
cctgaagattttgcagtgtattactgtcagcagtacbhcvncbhccctmtcacttttggcggagggaccaag

SEQ ID NO: 2150 - DNA, 72 bp, Artificial Sequence
  Description of Artificial Sequence: Synthetic oligonucleotide
  modified_base (41)..(41): a, c, t or g
cctgaagattttgcagtgtattactgtcagcagtacbhcvncbhccctwggacttttggcggagggaccaag

SEQ ID NO: 2151 - DNA, 72 bp, Artificial Sequence
  Description of Artificial Sequence: Synthetic oligonucleotide
  modified_base (41)..(41): a, c, t or g
cctgaagattttgcagtgtattactgtcagcagtacbhcvncbhccctcctacttttggcggagggaccaag

SEQ ID NO: 2152 - DNA, 72 bp, Artificial Sequence
  Description of Artificial Sequence: Synthetic oligonucleotide
  modified_base (40)..(40): a, c, t or g
gctgaagatgtggcagtttattactgtcagcagbhcbhcnhcactccttwcacttttggcggagggaccaag

SEQ ID NO: 2153 - DNA, 72 bp, Artificial Sequence
  Description of Artificial Sequence: Synthetic oligonucleotide
  modified_base (40)..(40): a, c, t or g
gctgaagatgtggcagtttattactgtcagcagbhcbhcnhcactcctmtcacttttggcggagggaccaag

SEQ ID NO: 2154 - DNA, 72 bp, Artificial Sequence
  Description of Artificial Sequence: Synthetic oligonucleotide
  modified_base (40)..(40): a, c, t or g
gctgaagatgtggcagtttattactgtcagcagbhcbhcnhcactcctwggacttttggcggagggaccaag

SEQ ID NO: 2155 - DNA, 72 bp, Artificial Sequence
  Description of Artificial Sequence: Synthetic oligonucleotide
  modified_base (40)..(40): a, c, t or g
gctgaagatgtggcagtttattactgtcagcagbhcbhcnhcactcctcctacttttggcggagggaccaag

SEQ ID NO: 2156 - DNA, 72 bp, Artificial Sequence
  Description of Artificial Sequence: Synthetic oligonucleotide
gctgaagatgtggcagtttattactgtcagcagbhcbhcagtbhcccttwcacttttggcggagggaccaag

SEQ ID NO: 2157 - DNA, 72 bp, Artificial Sequence
  Description of Artificial Sequence: Synthetic oligonucleotide
gctgaagatgtggcagtttattactgtcagcagbhcbhcagtbhccctmtcacttttggcggagggaccaag

SEQ ID NO: 2158 - DNA, 72 bp, Artificial Sequence
  Description of Artificial Sequence: Synthetic oligonucleotide
gctgaagatgtggcagtttattactgtcagcagbhcbhcagtbhccctwggacttttggcggagggaccaag

SEQ ID NO: 2159 - DNA, 72 bp, Artificial Sequence
  Description of Artificial Sequence: Synthetic oligonucleotide
gctgaagatgtggcagtttattactgtcagcagbhcbhcagtbhccctcctacttttggcggagggaccaag

SEQ ID NO: 2160 - DNA, 72 bp, Artificial Sequence
  Description of Artificial Sequence: Synthetic oligonucleotide
  modified_base (40)..(40): a, c, t or g
gctgaagatgtggcagtttattactgtcagcagbhctacnhcbhcccttwcacttttggcggagggaccaag

SEQ ID NO: 2161 - DNA, 72 bp, Artificial Sequence
  Description of Artificial Sequence: Synthetic oligonucleotide
  modified_base (40)..(40): a, c, t or g
gctgaagatgtggcagtttattactgtcagcagbhctacnhcbhccctmtcacttttggcggagggaccaag

SEQ ID NO: 2162 - DNA, 72 bp, Artificial Sequence
  Description of Artificial Sequence: Synthetic oligonucleotide
  modified_base (40)..(40): a, c, t or g
gctgaagatgtggcagtttattactgtcagcagbhctacnhcbhccctwggacttttggcggagggaccaag

SEQ ID NO: 2163 - DNA, 72 bp, Artificial Sequence
  Description of Artificial Sequence: Synthetic oligonucleotide
  modified_base (40)..(40): a, c, t or g
gctgaagatgtggcagtttattactgtcagcagbhctacnhcbhccctcctacttttggcggagggaccaag

SEQ ID NO: 2164 - DNA, 72 bp, Artificial Sequence
  Description of Artificial Sequence: Synthetic oligonucleotide
  modified_base (40)..(40): a, c, t or g
gctgaagatgtggcagtttattactgtcagcagtacbhcnhcbhcccttwcacttttggcggagggaccaag

SEQ ID NO: 2165 - DNA, 72 bp, Artificial Sequence
  Description of Artificial Sequence: Synthetic oligonucleotide
  modified_base (40)..(40): a, c, t or g
gctgaagatgtggcagtttattactgtcagcagtacbhcnhcbhccctmtcacttttggcggagggaccaag

SEQ ID NO: 2166 - DNA, 72 bp, Artificial Sequence
  Description of Artificial Sequence: Synthetic oligonucleotide
  modified_base (40)..(40): a, c, t or g
gctgaagatgtggcagtttattactgtcagcagtacbhcnhcbhccctwggacttttggcggagggaccaag

SEQ ID NO: 2167 - DNA, 72 bp, Artificial Sequence
  Description of Artificial Sequence: Synthetic oligonucleotide
  modified_base (40)..(40): a, c, t or g
gctgaagatgtggcagtttattactgtcagcagtacbhcnhcbhccctcctacttttggcggagggaccaag

SEQ ID NO: 2168 - DNA, 27 bp, Artificial Sequence
  Description of Artificial Sequence: Synthetic oligonucleotide
swmswmtacaatagttacycttwcact

SEQ ID NO: 2169 - DNA, 27 bp, Artificial Sequence
  Description of Artificial Sequence: Synthetic oligonucleotide
cagcagbhcvrmagttacycttwcact

SEQ ID NO: 2170 - DNA, 27 bp, Artificial Sequence
  Description of Artificial Sequence: Synthetic oligonucleotide
cagcagbhcaatmbctacycttwcact

SEQ ID NO: 2171 - DNA, 27 bp, Artificial Sequence
  Description of Artificial Sequence: Synthetic oligonucleotide
cagcagbhcaatagtywcycttwcact

SEQ ID NO: 2172 - DNA, 27 bp, Artificial Sequence
  Description of Artificial Sequence: Synthetic oligonucleotide
cagcagtacvrmmbctacycttwcact

SEQ ID NO: 2173 - DNA, 27 bp, Artificial Sequence
  Description of Artificial Sequence: Synthetic oligonucleotide
cagcagtacvrmagtywcycttwcact

SEQ ID NO: 2174 - DNA, 27 bp, Artificial Sequence
  Description of Artificial Sequence: Synthetic oligonucleotide
cagcagtacaatmbcywcycttwcact

SEQ ID NO: 2175 - DNA, 27 bp, Artificial Sequence
  Description of Artificial Sequence: Synthetic oligonucleotide
swmcagbhcaatagttacycttwcact

SEQ ID NO: 2176 - DNA, 27 bp, Artificial Sequence
  Description of Artificial Sequence: Synthetic oligonucleotide
swmcagtacvrmagttacycttwcact

SEQ ID NO: 2177 - DNA, 27 bp, Artificial Sequence
  Description of Artificial Sequence: Synthetic oligonucleotide
swmcagtacaatmbctacycttwcact

SEQ ID NO: 2178 - DNA, 27 bp, Artificial Sequence
  Description of Artificial Sequence: Synthetic oligonucleotide
swmcagtacaatagtywcycttwcact

SEQ ID NO: 2179 - DNA, 27 bp, Artificial Sequence
  Description of Artificial Sequence: Synthetic oligonucleotide
cagswmbhcaatagttacycttwcact

SEQ ID NO: 2180 - DNA, 27 bp, Artificial Sequence
  Description of Artificial Sequence: Synthetic oligonucleotide
cagswmtacvrmagttacycttwcact

SEQ ID NO: 2181 - DNA, 27 bp, Artificial Sequence
  Description of Artificial Sequence: Synthetic oligonucleotide
cagswmtacaatmbctacycttwcact

SEQ ID NO: 2182 - DNA, 27 bp, Artificial Sequence
  Description of Artificial Sequence: Synthetic oligonucleotide
cagswmtacaatagtywcycttwcact

SEQ ID NO: 2183 - DNA, 27 bp, Artificial Sequence
  Description of Artificial Sequence: Synthetic oligonucleotide
swmswmtacaatagttacyctmtcact

SEQ ID NO: 2184 - DNA, 27 bp, Artificial Sequence
  Description of Artificial Sequence: Synthetic oligonucleotide
cagcagbhcvrmagttacyctmtcact

SEQ ID NO: 2185 - DNA, 27 bp, Artificial Sequence
  Description of Artificial Sequence: Synthetic oligonucleotide
cagcagbhcaatmbctacyctmtcact

SEQ ID NO: 2186 - DNA, 27 bp, Artificial Sequence
  Description of Artificial Sequence: Synthetic oligonucleotide
cagcagbhcaatagtywcyctmtcact

SEQ ID NO: 2187 - DNA, 27 bp, Artificial Sequence
  Description of Artificial Sequence: Synthetic oligonucleotide
cagcagtacvrmmbctacyctmtcact

SEQ ID NO: 2188 - DNA, 27 bp, Artificial Sequence
  Description of Artificial Sequence: Synthetic oligonucleotide
cagcagtacvrmagtywcyctmtcact

SEQ ID NO: 2189 - DNA, 27 bp, Artificial Sequence
  Description of Artificial Sequence: Synthetic oligonucleotide
cagcagtacaatmbcywcyctmtcact

SEQ ID NO: 2190 - DNA, 27 bp, Artificial Sequence
  Description of Artificial Sequence: Synthetic oligonucleotide
swmcagbhcaatagttacyctmtcact

SEQ ID NO: 2191 - DNA, 27 bp, Artificial Sequence
  Description of Artificial Sequence: Synthetic oligonucleotide
swmcagtacvrmagttacyctmtcact

SEQ ID NO: 2192 - DNA, 27 bp, Artificial Sequence
  Description of Artificial Sequence: Synthetic oligonucleotide
swmcagtacaatmbctacyctmtcact

SEQ ID NO: 2193 - DNA, 27 bp, Artificial Sequence
  Description of Artificial Sequence: Synthetic oligonucleotide
swmcagtacaatagtywcyctmtcact

SEQ ID NO: 2194 - DNA, 27 bp, Artificial Sequence
  Description of Artificial Sequence: Synthetic oligonucleotide
cagswmbhcaatagttacyctmtcact

SEQ ID NO: 2195 - DNA, 27 bp, Artificial Sequence
  Description of Artificial Sequence: Synthetic oligonucleotide
cagswmtacvrmagttacyctmtcact

SEQ ID NO: 2196 - DNA, 27 bp, Artificial Sequence
  Description of Artificial Sequence: Synthetic oligonucleotide
cagswmtacaatmbctacyctmtcact

SEQ ID NO: 2197 - DNA, 27 bp, Artificial Sequence
  Description of Artificial Sequence: Synthetic oligonucleotide
cagswmtacaatagtywcyctmtcact

SEQ ID NO: 2198 - DNA, 27 bp, Artificial Sequence
  Description of Artificial Sequence: Synthetic oligonucleotide
swmswmtacaatagttacyctwggact

SEQ ID NO: 2199 - DNA, 27 bp, Artificial Sequence
  Description of Artificial Sequence: Synthetic oligonucleotide
cagcagbhcvrmagttacyctwggact

SEQ ID NO: 2200 - DNA, 27 bp, Artificial Sequence
  Description of Artificial Sequence: Synthetic oligonucleotide
cagcagbhcaatmbctacyctwggact

SEQ ID NO: 2201 - DNA, 27 bp, Artificial Sequence
  Description of Artificial Sequence: Synthetic oligonucleotide
cagcagbhcaatagtywcyctwggact

SEQ ID NO: 2202 - DNA, 27 bp, Artificial Sequence
  Description of Artificial Sequence: Synthetic oligonucleotide
cagcagtacvrmmbctacyctwggact

SEQ ID NO: 2203 - DNA, 27 bp, Artificial Sequence
  Description of Artificial Sequence: Synthetic oligonucleotide
cagcagtacvrmagtywcyctwggact

SEQ ID NO: 2204 - DNA, 27 bp, Artificial Sequence
  Description of Artificial Sequence: Synthetic oligonucleotide
cagcagtacaatmbcywcyctwggact

SEQ ID NO: 2205 - DNA, 27 bp, Artificial Sequence
  Description of Artificial Sequence: Synthetic oligonucleotide
swmcagbhcaatagttacyctwggact

SEQ ID NO: 2206 - DNA, 27 bp, Artificial Sequence
  Description of Artificial Sequence: Synthetic oligonucleotide
swmcagtacvrmagttacyctwggact

SEQ ID NO: 2207 - DNA, 27 bp, Artificial Sequence
  Description of Artificial Sequence: Synthetic oligonucleotide
swmcagtacaatmbctacyctwggact

SEQ ID NO: 2208 - DNA, 27 bp, Artificial Sequence
  Description of Artificial Sequence: Synthetic oligonucleotide
swmcagtacaatagtywcyctwggact

SEQ ID NO: 2209 - DNA, 27 bp, Artificial Sequence
  Description of Artificial Sequence: Synthetic oligonucleotide
cagswmbhcaatagttacyctwggact

SEQ ID NO: 2210 - DNA, 27 bp, Artificial Sequence
  Description of Artificial Sequence: Synthetic oligonucleotide
cagswmtacvrmagttacyctwggact

SEQ ID NO: 2211 - DNA, 27 bp, Artificial Sequence
  Description of Artificial Sequence: Synthetic oligonucleotide
cagswmtacaatmbctacyctwggact

SEQ ID NO: 2212 - DNA, 27 bp, Artificial Sequence
  Description of Artificial Sequence: Synthetic oligonucleotide
cagswmtacaatagtywcyctwggact

SEQ ID NO: 2213 - DNA, 27 bp, Artificial Sequence
  Description of Artificial Sequence: Synthetic oligonucleotide
swmswmtacaatagttacyctcctact

SEQ ID NO: 2214 - DNA, 27 bp, Artificial Sequence
  Description of Artificial Sequence: Synthetic oligonucleotide
cagcagbhcvrmagttacyctcctact

SEQ ID NO: 2215 - DNA, 27 bp, Artificial Sequence
  Description of Artificial Sequence: Synthetic oligonucleotide
cagcagbhcaatmbctacyctcctact

SEQ ID NO: 2216 - DNA, 27 bp, Artificial Sequence
  Description of Artificial Sequence: Synthetic oligonucleotide
cagcagbhcaatagtywcyctcctact

SEQ ID NO: 2217 - DNA, 27 bp, Artificial Sequence
  Description of Artificial Sequence: Synthetic oligonucleotide
cagcagtacvrmmbctacyctcctact

SEQ ID NO: 2218 - DNA, 27 bp, Artificial Sequence
  Description of Artificial Sequence: Synthetic oligonucleotide
cagcagtacvrmagtywcyctcctact

SEQ ID NO: 2219 - DNA, 27 bp, Artificial Sequence
  Description of Artificial Sequence: Synthetic oligonucleotide
cagcagtacaatmbcywcyctcctact

SEQ ID NO: 2220 - DNA, 27 bp, Artificial Sequence
  Description of Artificial Sequence: Synthetic oligonucleotide
swmcagbhcaatagttacyctcctact

SEQ ID NO: 2221 - DNA, 27 bp, Artificial Sequence
  Description of Artificial Sequence: Synthetic oligonucleotide
swmcagtacvrmagttacyctcctact

SEQ ID NO: 2222 - DNA, 27 bp, Artificial Sequence
  Description of Artificial Sequence: Synthetic oligonucleotide
swmcagtacaatmbctacyctcctact

SEQ ID NO: 2223 - DNA, 27 bp, Artificial Sequence
  Description of Artificial Sequence: Synthetic oligonucleotide
swmcagtacaatagtywcyctcctact

SEQ ID NO: 2224 - DNA, 27 bp, Artificial Sequence
  Description of Artificial Sequence: Synthetic oligonucleotide
cagswmbhcaatagttacyctcctact

SEQ ID NO: 2225 - DNA, 27 bp, Artificial Sequence
  Description of Artificial Sequence: Synthetic oligonucleotide
cagswmtacvrmagttacyctcctact

SEQ ID NO: 2226 - DNA, 27 bp, Artificial Sequence
  Description of Artificial Sequence: Synthetic oligonucleotide
cagswmtacaatmbctacyctcctact

SEQ ID NO: 2227 - DNA, 27 bp, Artificial Sequence
  Description of Artificial Sequence: Synthetic oligonucleotide
cagswmtacaatagtywcyctcctact

SEQ ID NO: 2228 - DNA, 27 bp, Artificial Sequence
  Description of Artificial Sequence: Synthetic oligonucleotide
swmswmgcaaatagtttcccttwcact

SEQ ID NO: 2229 - DNA, 27 bp, Artificial Sequence
  Description of Artificial Sequence: Synthetic oligonucleotide
  modified_base (8)..(8): a, c, t or g
  modified_base (10)..(10): a, c, t or g
cagcagrnanhcagtttcccttwcact

SEQ ID NO: 2230 - DNA, 27 bp, Artificial Sequence
  Description of Artificial Sequence: Synthetic oligonucleotide
  modified_base (8)..(8): a, c, t or g
  modified_base (13)..(13): a, c, t or g
cagcagrnaaatnhcttcccttwcact

SEQ ID NO: 2231 - DNA, 27 bp, Artificial Sequence
  Description of Artificial Sequence: Synthetic oligonucleotide
  modified_base (8)..(8): a, c, t or g
cagcagrnaaatagtywcccttwcact

SEQ ID NO: 2232 - DNA, 27 bp, Artificial Sequence
  Description of Artificial Sequence: Synthetic oligonucleotide
  modified_base (10)..(10): a, c, t or g
  modified_base (13)..(13): a, c, t or g
cagcaggcanhcnhcttcccttwcact

SEQ ID NO: 2233 - DNA, 27 bp, Artificial Sequence
  Description of Artificial Sequence: Synthetic oligonucleotide
  modified_base (10)..(10): a, c, t or g
cagcaggcanhcagtywcccttwcact

SEQ ID NO: 2234 - DNA, 27 bp, Artificial Sequence
  Description of Artificial Sequence: Synthetic oligonucleotide
  modified_base (13)..(13): a, c, t or g
cagcaggcaaatnhcywcccttwcact

SEQ ID NO: 2235 - DNA, 27 bp, Artificial Sequence
  Description of Artificial Sequence: Synthetic oligonucleotide
  modified_base (8)..(8): a, c, t or g
swmcagrnaaatagtttcccttwcact

SEQ ID NO: 2236 - DNA, 27 bp, Artificial Sequence
  Description of Artificial Sequence: Synthetic oligonucleotide
  modified_base (10)..(10): a, c, t or g
swmcaggcanhcagtttcccttwcact

SEQ ID NO: 2237 - DNA, 27 bp, Artificial Sequence
  Description of Artificial Sequence: Synthetic oligonucleotide
  modified_base (13)..(13): a, c, t or g
swmcaggcaaatnhcttcccttwcact

SEQ ID NO: 2238 - DNA, 27 bp, Artificial Sequence
  Description of Artificial Sequence: Synthetic oligonucleotide
swmcaggcaaatagtywcccttwcact

SEQ ID NO: 2239 - DNA, 27 bp, Artificial Sequence
  Description of Artificial Sequence: Synthetic oligonucleotide
  modified_base (8)..(8): a, c, t or g
cagswmrnaaatagtttcccttwcact

SEQ ID NO: 2240 - DNA, 27 bp, Artificial Sequence
  Description of Artificial Sequence: Synthetic oligonucleotide
  modified_base (10)..(10): a, c, t or g
cagswmgcanhcagtttcccttwcact

SEQ ID NO: 2241 - DNA, 27 bp, Artificial Sequence
  Description of Artificial Sequence: Synthetic oligonucleotide
  modified_base (13)..(13): a, c, t or g
cagswmgcaaatnhcttcccttwcact

SEQ ID NO: 2242 - DNA, 27 bp, Artificial Sequence
  Description of Artificial Sequence: Synthetic oligonucleotide
cagswmgcaaatagtywcccttwcact

SEQ ID NO: 2243 - DNA, 27 bp, Artificial Sequence
  Description of Artificial Sequence: Synthetic oligonucleotide
swmswmgcaaatagtttccctmtcact

SEQ ID NO: 2244 - DNA, 27 bp, Artificial Sequence
  Description of Artificial Sequence: Synthetic oligonucleotide
  modified_base (8)..(8): a, c, t or g
  modified_base (10)..(10): a, c, t or g
cagcagrnanhcagtttccctmtcact

SEQ ID NO: 2245 - DNA, 27 bp, Artificial Sequence
  Description of Artificial Sequence: Synthetic oligonucleotide
  modified_base (8)..(8): a, c, t or g
  modified_base (13)..(13): a, c, t or g
cagcagrnaaatnhcttccctmtcact

SEQ ID NO: 2246 - DNA, 27 bp, Artificial Sequence
  Description of Artificial Sequence: Synthetic oligonucleotide
  modified_base (8)..(8): a, c, t or g
cagcagrnaaatagtywccctmtcact

SEQ ID NO: 2247 - DNA, 27 bp, Artificial Sequence
  Description of Artificial Sequence: Synthetic oligonucleotide
  modified_base (10)..(10): a, c, t or g
  modified_base (13)..(13): a, c, t or g
cagcaggcanhcnhcttccctmtcact

SEQ ID NO: 2248 - DNA, 27 bp, Artificial Sequence
  Description of Artificial Sequence: Synthetic oligonucleotide
  modified_base (10)..(10): a, c, t or g
cagcaggcanhcagtywccctmtcact

SEQ ID NO: 2249 - DNA, 27 bp, Artificial Sequence
  Description of Artificial Sequence: Synthetic oligonucleotide
  modified_base (13)..(13): a, c, t or g
cagcaggcaaatnhcywccctmtcact

SEQ ID NO: 2250 - DNA, 27 bp, Artificial Sequence
  Description of Artificial Sequence: Synthetic oligonucleotide
  modified_base (8)..(8): a, c, t or g
swmcagrnaaatagtttccctmtcact

SEQ ID NO: 2251 - DNA, 27 bp, Artificial Sequence
  Description of Artificial Sequence: Synthetic oligonucleotide
  modified_base (10)..(10): a, c, t or g
swmcaggcanhcagtttccctmtcact

SEQ ID NO: 2252 - DNA, 27 bp, Artificial Sequence
  Description of Artificial Sequence: Synthetic oligonucleotide
  modified_base (13)..(13): a, c, t or g
swmcaggcaaatnhcttccctmtcact

SEQ ID NO: 2253 - DNA, 27 bp, Artificial Sequence
  Description of Artificial Sequence: Synthetic oligonucleotide
swmcaggcaaatagtywccctmtcact

SEQ ID NO: 2254 - DNA, 27 bp, Artificial Sequence
  Description of Artificial Sequence: Synthetic oligonucleotide
  modified_base (8)..(8): a, c, t or g
cagswmrnaaatagtttccctmtcact

SEQ ID NO: 2255 - DNA, 27 bp, Artificial Sequence
  Description of Artificial Sequence: Synthetic oligonucleotide
  modified_base (10)..(10): a, c, t or g
cagswmgcanhcagtttccctmtcact

SEQ ID NO: 2256 - DNA, 27 bp, Artificial Sequence
  Description of Artificial Sequence: Synthetic oligonucleotide
  modified_base (13)..(13): a, c, t or g
cagswmgcaaatnhcttccctmtcact

SEQ ID NO: 2257 - DNA, 27 bp, Artificial Sequence
  Description of Artificial Sequence: Synthetic oligonucleotide
cagswmgcaaatagtywccctmtcact

SEQ ID NO: 2258 - DNA, 27 bp, Artificial Sequence
  Description of Artificial Sequence: Synthetic oligonucleotide
swmswmgcaaatagtttccctwggact

SEQ ID NO: 2259 - DNA, 27 bp, Artificial Sequence
  Description of Artificial Sequence: Synthetic oligonucleotide
  modified_base (8)..(8): a, c, t or g
  modified_base (10)..(10): a, c, t or g
cagcagrnanhcagtttccctwggact

SEQ ID NO: 2260 - DNA, 27 bp, Artificial Sequence
  Description of Artificial Sequence: Synthetic oligonucleotide
  modified_base (8)..(8): a, c, t or g
  modified_base (13)..(13): a, c, t or g
cagcagrnaaatnhcttccctwggact

SEQ ID NO: 2261 - DNA, 27 bp, Artificial Sequence
  Description of Artificial Sequence: Synthetic oligonucleotide
  modified_base (8)..(8): a, c, t or g
cagcagrnaaatagtywccctwggact

SEQ ID NO: 2262 - DNA, 27 bp, Artificial Sequence
  Description of Artificial Sequence: Synthetic oligonucleotide
  modified_base (10)..(10): a, c, t or g
  modified_base (13)..(13): a, c, t or g
cagcaggcanhcnhcttccctwggact

SEQ ID NO: 2263 - DNA, 27 bp, Artificial Sequence
  Description of Artificial Sequence: Synthetic oligonucleotide
  modified_base (10)..(10): a, c, t or g
cagcaggcanhcagtywccctwggact

SEQ ID NO: 2264 - DNA, 27 bp, Artificial Sequence
  Description of Artificial Sequence: Synthetic oligonucleotide
  modified_base (13)..(13): a, c, t or g
cagcaggcaaatnhcywccctwggact

SEQ ID NO: 2265 - DNA, 27 bp, Artificial Sequence
  Description of Artificial Sequence: Synthetic oligonucleotide
  modified_base (8)..(8): a, c, t or g
swmcagrnaaatagtttccctwggact

SEQ ID NO: 2266 - DNA, 27 bp, Artificial Sequence
  Description of Artificial Sequence: Synthetic oligonucleotide
  modified_base (10)..(10): a, c, t or g
swmcaggcanhcagtttccctwggact

SEQ ID NO: 2267 - DNA, 27 bp, Artificial Sequence
  Description of Artificial Sequence: Synthetic oligonucleotide
  modified_base (13)..(13): a, c, t or g
swmcaggcaaatnhcttccctwggact

SEQ ID NO: 2268 - DNA, 27 bp, Artificial Sequence
  Description of Artificial Sequence: Synthetic oligonucleotide
swmcaggcaaatagtywccctwggact

SEQ ID NO: 2269 - DNA, 27 bp, Artificial Sequence
  Description of Artificial Sequence: Synthetic oligonucleotide
  modified_base (8)..(8): a, c, t or g
cagswmrnaaatagtttccctwggact

SEQ ID NO: 2270 - DNA, 27 bp, Artificial Sequence
  Description of Artificial Sequence: Synthetic oligonucleotide
  modified_base (10)..(10): a, c, t or g
cagswmgcanhcagtttccctwggact

SEQ ID NO: 2271 - DNA, 27 bp, Artificial Sequence
  Description of Artificial Sequence: Synthetic oligonucleotide
  modified_base (13)..(13): a, c, t or g
cagswmgcaaatnhcttccctwggact

SEQ ID NO: 2272 - DNA, 27 bp, Artificial Sequence
  Description of Artificial Sequence: Synthetic oligonucleotide
cagswmgcaaatagtywccctwggact

SEQ ID NO: 2273 - DNA, 27 bp, Artificial Sequence
  Description of Artificial Sequence: Synthetic oligonucleotide
swmswmgcaaatagtttccctcctact

SEQ ID NO: 2274 - DNA, 27 bp, Artificial Sequence
  Description of Artificial Sequence: Synthetic oligonucleotide
  modified_base (8)..(8): a, c, t or g
  modified_base (10)..(10): a, c, t or g
cagcagrnanhcagtttccctcctact

SEQ ID NO: 2275 - DNA, 27 bp, Artificial Sequence
  Description of Artificial Sequence: Synthetic oligonucleotide
  modified_base (8)..(8): a, c, t or g
  modified_base (13)..(13): a, c, t or g
cagcagrnaaatnhcttccctcctact

SEQ ID NO: 2276 - DNA, 27 bp, Artificial Sequence
  Description of Artificial Sequence: Synthetic oligonucleotide
  modified_base (8)..(8): a, c, t or g
cagcagrnaaatagtywccctcctact

SEQ ID NO: 2277 - DNA, 27 bp, Artificial Sequence
  Description of Artificial Sequence: Synthetic oligonucleotide
  modified_base (10)..(10): a, c, t or g
  modified_base (13)..(13): a, c, t or g
cagcaggcanhcnhcttccctcctact

SEQ ID NO: 2278 - DNA, 27 bp, Artificial Sequence
  Description of Artificial Sequence: Synthetic oligonucleotide
  modified_base (10)..(10): a, c, t or g
cagcaggcanhcagtywccctcctact

SEQ ID NO: 2279 - DNA, 27 bp, Artificial Sequence
  Description of Artificial Sequence: Synthetic oligonucleotide
  modified_base (13)..(13): a, c, t or g
cagcaggcaaatnhcywccctcctact

SEQ ID NO: 2280 - DNA, 27 bp, Artificial Sequence
  Description of Artificial Sequence: Synthetic oligonucleotide
  modified_base (8)..(8): a, c, t or g
swmcagrnaaatagtttccctcctact

SEQ ID NO: 2281 - DNA, 27 bp, Artificial Sequence
  Description of Artificial Sequence: Synthetic oligonucleotide
  modified_base (10)..(10): a, c, t or g
swmcaggcanhcagtttccctcctact

SEQ ID NO: 2282 - DNA, 27 bp, Artificial Sequence
  Description of Artificial Sequence: Synthetic oligonucleotide
  modified_base (13)..(13): a, c, t or g
swmcaggcaaatnhcttccctcctact

SEQ ID NO: 2283 - DNA, 27 bp, Artificial Sequence
  Description of Artificial Sequence: Synthetic oligonucleotide
swmcaggcaaatagtywccctcctact

SEQ ID NO: 2284 - DNA, 27 bp, Artificial Sequence
  Description of Artificial Sequence: Synthetic oligonucleotide
  modified_base (8)..(8): a, c, t or g
cagswmrnaaatagtttccctcctact

SEQ ID NO: 2285 - DNA, 27 bp, Artificial Sequence
  Description of Artificial Sequence: Synthetic oligonucleotide
  modified_base (10)..(10): a, c, t or g
cagswmgcanhcagtttccctcctact

SEQ ID NO: 2286 - DNA, 27 bp, Artificial Sequence
  Description of Artificial Sequence: Synthetic oligonucleotide
  modified_base (13)..(13): a, c, t or g
cagswmgcaaatnhcttccctcctact

SEQ ID NO: 2287 - DNA, 27 bp, Artificial Sequence
  Description of Artificial Sequence: Synthetic oligonucleotide
cagswmgcaaatagtywccctcctact

SEQ ID NO: 2288 - DNA, 27 bp, Artificial Sequence
  Description of Artificial Sequence: Synthetic oligonucleotide
swmswmtacgataatctcccttwcact

SEQ ID NO: 2289 - DNA, 27 bp, Artificial Sequence
  Description of Artificial Sequence: Synthetic oligonucleotide
  modified_base (10)..(10): a, c, t or g
cagcagbhcnhcaatctcccttwcact

SEQ ID NO: 2290 - DNA, 27 bp, Artificial Sequence
  Description of Artificial Sequence: Synthetic oligonucleotide
  modified_base (13)..(13): a, c, t or g
cagcagbhcgatnhcctcccttwcact

SEQ ID NO: 2291 - DNA, 27 bp, Artificial Sequence
  Description of Artificial Sequence: Synthetic oligonucleotide
cagcagbhcgataatywcccttwcact

SEQ ID NO: 2292 - DNA, 27 bp, Artificial Sequence
  Description of Artificial Sequence: Synthetic oligonucleotide
  modified_base (10)..(10): a, c, t or g
  modified_base (13)..(13): a, c, t or g
cagcagtacnhcnhcctcccttwcact

SEQ ID NO: 2293 - DNA, 27 bp, Artificial Sequence
  Description of Artificial Sequence: Synthetic oligonucleotide
  modified_base (10)..(10): a, c, t or g
cagcagtacnhcaatywcccttwcact

SEQ ID NO: 2294 - DNA, 27 bp, Artificial Sequence
  Description of Artificial Sequence: Synthetic oligonucleotide
  modified_base (13)..(13): a, c, t or g
cagcagtacgatnhcywcccttwcact

SEQ ID NO: 2295 - DNA, 27 bp, Artificial Sequence
  Description of Artificial Sequence: Synthetic oligonucleotide
swmcagbhcgataatctcccttwcact

SEQ ID NO: 2296 - DNA, 27 bp, Artificial Sequence
  Description of Artificial Sequence: Synthetic oligonucleotide
  modified_base (10)..(10): a, c, t or g
swmcagtacnhcaatctcccttwcact

SEQ ID NO: 2297 - DNA, 27 bp, Artificial Sequence
  Description of Artificial Sequence: Synthetic oligonucleotide
  modified_base (13)..(13): a, c, t or g
swmcagtacgatnhcctcccttwcact

SEQ ID NO: 2298 - DNA, 27 bp, Artificial Sequence
  Description of Artificial Sequence: Synthetic oligonucleotide
swmcagtacgataatywcccttwcact

SEQ ID NO: 2299 - DNA, 27 bp, Artificial Sequence
  Description of Artificial Sequence: Synthetic oligonucleotide
cagswmbhcgataatctcccttwcact

SEQ ID NO: 2300 - DNA, 27 bp, Artificial Sequence
  Description of Artificial Sequence: Synthetic oligonucleotide
  modified_base (10)..(10): a, c, t or g
cagswmtacnhcaatctcccttwcact

SEQ ID NO: 2301 - DNA, 27 bp, Artificial Sequence
  Description of Artificial Sequence: Synthetic oligonucleotide
  modified_base (13)..(13): a, c, t or g
cagswmtacgatnhcctcccttwcact

SEQ ID NO: 2302 - DNA, 27 bp, Artificial Sequence
  Description of Artificial Sequence: Synthetic oligonucleotide
cagswmtacgataatywcccttwcact

SEQ ID NO: 2303 - DNA, 27 bp, Artificial Sequence
  Description of Artificial Sequence: Synthetic oligonucleotide
swmswmtacgataatctccctmtcact

SEQ ID NO: 2304 - DNA, 27 bp, Artificial Sequence
  Description of Artificial Sequence: Synthetic oligonucleotide
  modified_base (10)..(10): a, c, t or g
cagcagbhcnhcaatctccctmtcact

SEQ ID NO: 2305 - DNA, 27 bp, Artificial Sequence
  Description of Artificial Sequence: Synthetic oligonucleotide
  modified_base (13)..(13): a, c, t or g
cagcagbhcgatnhcctccctmtcact

SEQ ID NO: 2306 - DNA, 27 bp, Artificial Sequence
  Description of Artificial Sequence: Synthetic oligonucleotide
cagcagbhcgataatywccctmtcact

SEQ ID NO: 2307 - DNA, 27 bp, Artificial Sequence
  Description of Artificial Sequence: Synthetic oligonucleotide
  modified_base (10)..(10): a, c, t or g
  modified_base (13)..(13): a, c, t or g
cagcagtacnhcnhcctccctmtcact

SEQ ID NO: 2308 - DNA, 27 bp, Artificial Sequence
  Description of Artificial Sequence: Synthetic oligonucleotide
  modified_base (10)..(10): a, c, t or g
cagcagtacnhcaatywccctmtcact

SEQ ID NO: 2309 - DNA, 27 bp, Artificial Sequence
  Description of Artificial Sequence: Synthetic oligonucleotide
  modified_base (13)..(13): a, c, t or g
cagcagtacgatnhcywccctmtcact

SEQ ID NO: 2310 - DNA, 27 bp, Artificial Sequence
  Description of Artificial Sequence: Synthetic oligonucleotide
swmcagbhcgataatctccctmtcact

SEQ ID NO: 2311 - DNA, 27 bp, Artificial Sequence
  Description of Artificial Sequence: Synthetic oligonucleotide
  modified_base (10)..(10): a, c, t or g
swmcagtacnhcaatctccctmtcact

SEQ ID NO: 2312 - DNA, 27 bp, Artificial Sequence
  Description of Artificial Sequence: Synthetic oligonucleotide
  modified_base (13)..(13): a, c, t or g
swmcagtacgatnhcctccctmtcact

SEQ ID NO: 2313 - DNA, 27 bp, Artificial Sequence
  Description of Artificial Sequence: Synthetic oligonucleotide
swmcagtacgataatywccctmtcact

SEQ ID NO: 2314 - DNA, 27 bp, Artificial Sequence
  Description of Artificial Sequence: Synthetic oligonucleotide
cagswmbhcgataatctccctmtcact

SEQ ID NO: 2315 - DNA, 27 bp, Artificial Sequence
  Description of Artificial Sequence: Synthetic oligonucleotide
  modified_base (10)..(10): a, c, t or g
cagswmtacnhcaatctccctmtcact

SEQ ID NO: 2316 - DNA, 27 bp, Artificial Sequence
  Description of Artificial Sequence: Synthetic oligonucleotide
  modified_base (13)..(13): a, c, t or g
cagswmtacgatnhcctccctmtcact

SEQ ID NO: 2317 - DNA, 27 bp, Artificial Sequence
  Description of Artificial Sequence: Synthetic oligonucleotide
cagswmtacgataatywccctmtcact

SEQ ID NO: 2318 - DNA, 27 bp, Artificial Sequence
  Description of Artificial Sequence: Synthetic oligonucleotide
swmswmtacgataatctccctwggact

SEQ ID NO: 2319 - DNA, 27 bp, Artificial Sequence
  Description of Artificial Sequence: Synthetic oligonucleotide
  modified_base (10)..(10): a, c, t or g
cagcagbhcnhcaatctccctwggact

SEQ ID NO: 2320 - DNA, 27 bp, Artificial Sequence
  Description of Artificial Sequence: Synthetic oligonucleotide
  modified_base (13)..(13): a, c, t or g
cagcagbhcgatnhcctccctwggact

SEQ ID NO: 2321 - DNA, 27 bp, Artificial Sequence
  Description of Artificial Sequence: Synthetic oligonucleotide
cagcagbhcgataatywccctwggact

SEQ ID NO: 2322 - DNA, 27 bp, Artificial Sequence
  Description of Artificial Sequence: Synthetic oligonucleotide
  modified_base (10)..(10): a, c, t or g
  modified_base (13)..(13): a, c, t or g
cagcagtacnhcnhcctccctwggact

SEQ ID NO: 2323 - DNA, 27 bp, Artificial Sequence
  Description of Artificial Sequence: Synthetic oligonucleotide
  modified_base (10)..(10): a, c, t or g
cagcagtacnhcaatywccctwggact

SEQ ID NO: 2324 - DNA, 27 bp, Artificial Sequence
  Description of Artificial Sequence: Synthetic oligonucleotide
  modified_base (13)..(13): a, c, t or g
cagcagtacgatnhcywccctwggact

SEQ ID NO: 2325 - DNA, 27 bp, Artificial Sequence
  Description of Artificial Sequence: Synthetic oligonucleotide
swmcagbhcgataatctccctwggact

SEQ ID NO: 2326 - DNA, 27 bp, Artificial Sequence
  Description of Artificial Sequence: Synthetic oligonucleotide
  modified_base (10)..(10): a, c, t or g
swmcagtacnhcaatctccctwggact

SEQ ID NO: 2327 - DNA, 27 bp, Artificial Sequence
  Description of Artificial Sequence: Synthetic oligonucleotide
  modified_base (13)..(13): a, c, t or g
swmcagtacgatnhcctccctwggact

SEQ ID NO: 2328 - DNA, 27 bp, Artificial Sequence
  Description of Artificial Sequence: Synthetic oligonucleotide
swmcagtacgataatywccctwggact

SEQ ID NO: 2329 - DNA, 27 bp, Artificial Sequence
  Description of Artificial Sequence: Synthetic oligonucleotide
cagswmbhcgataatctccctwggact

SEQ ID NO: 2330 - DNA, 27 bp, Artificial Sequence
  Description of Artificial Sequence: Synthetic oligonucleotide
  modified_base (10)..(10): a, c, t or g
cagswmtacnhcaatctccctwggact

SEQ ID NO: 2331 - DNA, 27 bp, Artificial Sequence
  Description of Artificial Sequence: Synthetic oligonucleotide
  modified_base (13)..(13): a, c, t or g
cagswmtacgatnhcctccctwggact

SEQ ID NO: 2332 - DNA, 27 bp, Artificial Sequence
  Description of Artificial Sequence: Synthetic oligonucleotide
cagswmtacgataatywccctwggact

SEQ ID NO: 2333 - DNA, 27 bp, Artificial Sequence
  Description of Artificial Sequence: Synthetic oligonucleotide
swmswmtacgataatctccctcctact

SEQ ID NO: 2334 - DNA, 27 bp, Artificial Sequence
  Description of Artificial Sequence: Synthetic oligonucleotide
  modified_base (10)..(10): a, c, t or g
cagcagbhcnhcaatctccctcctact

SEQ ID NO: 2335 - DNA, 27 bp, Artificial Sequence
  Description of Artificial Sequence: Synthetic oligonucleotide
  modified_base (13)..(13): a, c, t or g
cagcagbhcgatnhcctccctcctact

SEQ ID NO: 2336 - DNA, 27 bp, Artificial Sequence
  Description of Artificial Sequence: Synthetic oligonucleotide
cagcagbhcgataatywccctcctact

SEQ ID NO: 2337 - DNA, 27 bp, Artificial Sequence
  Description of Artificial Sequence: Synthetic oligonucleotide
  modified_base (10)..(10): a, c, t or g
  modified_base (13)..(13): a, c, t or g
cagcagtacnhcnhcctccctcctact

SEQ ID NO: 2338 - DNA, 27 bp, Artificial Sequence
  Description of Artificial Sequence: Synthetic oligonucleotide
  modified_base (10)..(10): a, c, t or g
cagcagtacnhcaatywccctcctact

SEQ ID NO: 2339 - DNA, 27 bp, Artificial Sequence
  Description of Artificial Sequence: Synthetic oligonucleotide
  modified_base (13)..(13): a, c, t or g
cagcagtacgatnhcywccctcctact

SEQ ID NO: 2340 - DNA, 27 bp, Artificial Sequence
  Description of Artificial Sequence: Synthetic oligonucleotide
swmcagbhcgataatctccctcctact

SEQ ID NO: 2341 - DNA, 27 bp, Artificial Sequence
  Description of Artificial Sequence: Synthetic oligonucleotide
  modified_base (10)..(10): a, c, t or g
swmcagtacnhcaatctccctcctact

SEQ ID NO: 2342 - DNA, 27 bp, Artificial Sequence
  Description of Artificial Sequence: Synthetic oligonucleotide
  modified_base (13)..(13): a, c, t or g
swmcagtacgatnhcctccctcctact

SEQ ID NO: 2343 - DNA, 27 bp, Artificial Sequence
  Description of Artificial Sequence: Synthetic oligonucleotide
swmcagtacgataatywccctcctact

SEQ ID NO: 2344 - DNA, 27 bp, Artificial Sequence
  Description of Artificial Sequence: Synthetic oligonucleotide
cagswmbhcgataatctccctcctact

SEQ ID NO: 2345 - DNA, 27 bp, Artificial Sequence
  Description of Artificial Sequence: Synthetic oligonucleotide
  modified_base (10)..(10): a, c, t or g
cagswmtacnhcaatctccctcctact

SEQ ID NO: 2346 - DNA, 27 bp, Artificial Sequence
  Description of Artificial Sequence: Synthetic oligonucleotide
  modified_base (13)..(13): a, c, t or g
cagswmtacgatnhcctccctcctact

SEQ ID NO: 2347 - DNA, 27 bp, Artificial Sequence
  Description of Artificial Sequence: Synthetic oligonucleotide
cagswmtacgataatywccctcctact

SEQ ID NO: 2348 - DNA, 27 bp, Artificial Sequence
  Description of Artificial Sequence: Synthetic oligonucleotide
swmswmagctacagtactcctmtcact

SEQ ID NO: 2349 - DNA, 27 bp, Artificial Sequence
  Description of Artificial Sequence: Synthetic oligonucleotide
  modified_base (8)..(8): a, c, t or g
cagcaavnabhcagtactcctmtcact

SEQ ID NO: 2350 - DNA, 27 bp, Artificial Sequence
  Description of Artificial Sequence: Synthetic oligonucleotide
  modified_base (8)..(8): a, c, t or g
  modified_base (13)..(13): a, c, t or g
cagcaavnatacnhcactcctmtcact

SEQ ID NO: 2351 - DNA, 27 bp, Artificial Sequence
  Description of Artificial Sequence: Synthetic oligonucleotide
  modified_base (8)..(8): a, c, t or g
cagcaavnatacagtbhccctmtcact

SEQ ID NO: 2352 - DNA, 27 bp, Artificial Sequence
  Description of Artificial Sequence: Synthetic oligonucleotide
  modified_base (13)..(13): a, c, t or g
cagcaaagcbhcnhcactcctmtcact

SEQ ID NO: 2353 - DNA, 27 bp, Artificial Sequence
  Description of Artificial Sequence: Synthetic oligonucleotide
cagcaaagcbhcagtbhccctmtcact

SEQ ID NO: 2354 - DNA, 27 bp, Artificial Sequence
  Description of Artificial Sequence: Synthetic oligonucleotide
  modified_base (13)..(13): a, c, t or g
cagcaaagctacnhcbhccctmtcact

SEQ ID NO: 2355 - DNA, 27 bp, Artificial Sequence
  Description of Artificial Sequence: Synthetic oligonucleotide
  modified_base (8)..(8): a, c, t or g
swmcaavnatacagtactcctmtcact

SEQ ID NO: 2356 - DNA, 27 bp, Artificial Sequence
  Description of Artificial Sequence: Synthetic oligonucleotide
swmcaaagcbhcagtactcctmtcact

SEQ ID NO: 2357 - DNA, 27 bp, Artificial Sequence
  Description of Artificial Sequence: Synthetic oligonucleotide
  modified_base (13)..(13): a, c, t or g
swmcaaagctacnhcactcctmtcact

SEQ ID NO: 2358 - DNA, 27 bp, Artificial Sequence
  Description of Artificial Sequence: Synthetic oligonucleotide
swmcaaagctacagtbhccctmtcact

SEQ ID NO: 2359 - DNA, 27 bp, Artificial Sequence
  Description of Artificial Sequence: Synthetic oligonucleotide
  modified_base (8)..(8): a, c, t or g
cagswmvnatacagtactcctmtcact

SEQ ID NO: 2360 - DNA, 27 bp, Artificial Sequence
  Description of Artificial Sequence: Synthetic oligonucleotide
cagswmagcbhcagtactcctmtcact

SEQ ID NO: 2361 - DNA, 27 bp, Artificial Sequence
  Description of Artificial Sequence: Synthetic oligonucleotide
  modified_base (13)..(13): a, c, t or g
cagswmagctacnhcactcctmtcact

SEQ ID NO: 2362 - DNA, 27 bp, Artificial Sequence
  Description of Artificial Sequence: Synthetic oligonucleotide
cagswmagctacagtbhccctmtcact

SEQ ID NO: 2363 - DNA, 27 bp, Artificial Sequence
  Description of Artificial Sequence: Synthetic oligonucleotide
swmswmagctacagtactcctwggact

SEQ ID NO: 2364 - DNA, 27 bp, Artificial Sequence
  Description of Artificial Sequence: Synthetic oligonucleotide
  modified_base (8)..(8): a, c, t or g
cagcaavnabhcagtactcctwggact

SEQ ID NO: 2365 - DNA, 27 bp, Artificial Sequence
  Description of Artificial Sequence: Synthetic oligonucleotide
  modified_base (8)..(8): a, c, t or g
  modified_base (13)..(13): a, c, t or g
cagcaavnatacnhcactcctwggact

SEQ ID NO: 2366 - DNA, 27 bp, Artificial Sequence
  Description of Artificial Sequence: Synthetic oligonucleotide
  modified_base (8)..(8): a, c, t or g
cagcaavnatacagtbhccctwggact

SEQ ID NO: 2367 - DNA, 27 bp, Artificial Sequence
  Description of Artificial Sequence: Synthetic oligonucleotide
  modified_base (13)..(13): a, c, t or g
cagcaaagcbhcnhcactcctwggact

SEQ ID NO: 2368 - DNA, 27 bp, Artificial Sequence
  Description of Artificial Sequence: Synthetic oligonucleotide
cagcaaagcbhcagtbhccctwggact

SEQ ID NO: 2369 - DNA, 27 bp, Artificial Sequence
  Description of Artificial Sequence: Synthetic oligonucleotide
  modified_base (13)..(13): a, c, t or g
cagcaaagctacnhcbhccctwggact

SEQ ID NO: 2370 - DNA, 27 bp, Artificial Sequence
  Description of Artificial Sequence: Synthetic oligonucleotide
  modified_base (8)..(8): a, c, t or g
swmcaavnatacagtactcctwggact

SEQ ID NO: 2371 - DNA, 27 bp, Artificial Sequence
  Description of Artificial Sequence: Synthetic oligonucleotide
swmcaaagcbhcagtactcctwggact

SEQ ID NO: 2372 - DNA, 27 bp, Artificial Sequence
  Description of Artificial Sequence: Synthetic oligonucleotide
  modified_base (13)..(13): a, c, t or g
swmcaaagctacnhcactcctwggact

SEQ ID NO: 2373 - DNA, 27 bp, Artificial Sequence
  Description of Artificial Sequence: Synthetic oligonucleotide
swmcaaagctacagtbhccctwggact

SEQ ID NO: 2374 - DNA, 27 bp, Artificial Sequence
  Description of Artificial Sequence: Synthetic oligonucleotide
  modified_base (8)..(8): a, c, t or g
cagswmvnatacagtactcctwggact

SEQ ID NO: 2375 - DNA, 27 bp, Artificial Sequence
  Description of Artificial Sequence: Synthetic oligonucleotide
cagswmagcbhcagtactcctwggact

SEQ ID NO: 2376 - DNA, 27 bp, Artificial Sequence
  Description of Artificial Sequence: Synthetic oligonucleotide
  modified_base (13)..(13): a, c, t or g
cagswmagctacnhcactcctwggact

SEQ ID NO: 2377 - DNA, 27 bp, Artificial Sequence
  Description of Artificial Sequence: Synthetic oligonucleotide
cagswmagctacagtbhccctwggact

SEQ ID NO: 2378 - DNA, 27 bp, Artificial Sequence
  Description of Artificial Sequence: Synthetic oligonucleotide
swmswmagctacagtactcctcctact

SEQ ID NO: 2379 - DNA, 27 bp, Artificial Sequence
  Description of Artificial Sequence: Synthetic oligonucleotide
  modified_base (8)..(8): a, c, t or g
cagcaavnabhcagtactcctcctact

SEQ ID NO: 2380 - DNA, 27 bp, Artificial Sequence
  Description of Artificial Sequence: Synthetic oligonucleotide
  modified_base (8)..(8): a, c, t or g
  modified_base (13)..(13): a, c, t or g
cagcaavnatacnhcactcctcctact

SEQ ID NO: 2381 - DNA, 27 bp, Artificial Sequence
  Description of Artificial Sequence: Synthetic oligonucleotide
  modified_base (8)..(8): a, c, t or g
cagcaavnatacagtbhccctcctact

SEQ ID NO: 2382 - DNA, 27 bp, Artificial Sequence
  Description of Artificial Sequence: Synthetic oligonucleotide
  modified_base (13)..(13): a, c, t or g
cagcaaagcbhcnhcactcctcctact

SEQ ID NO: 2383 - DNA, 27 bp, Artificial Sequence
  Description of Artificial Sequence: Synthetic oligonucleotide
cagcaaagcbhcagtbhccctcctact

SEQ ID NO: 2384 - DNA, 27 bp, Artificial Sequence
  Description of Artificial Sequence: Synthetic oligonucleotide
  modified_base (13)..(13): a, c, t or g
cagcaaagctacnhcbhccctcctact

SEQ ID NO: 2385 - DNA, 27 bp, Artificial Sequence
  Description of Artificial Sequence: Synthetic oligonucleotide
  modified_base (8)..(8): a, c, t or g
swmcaavnatacagtactcctcctact

SEQ ID NO: 2386 - DNA, 27 bp, Artificial Sequence
  Description of Artificial Sequence: Synthetic oligonucleotide
swmcaaagcbhcagtactcctcctact

SEQ ID NO: 2387 - DNA, 27 bp, Artificial Sequence
  Description of Artificial Sequence: Synthetic oligonucleotide
  modified_base (13)..(13): a, c, t or g
swmcaaagctacnhcactcctcctact

SEQ ID NO: 2388 - DNA, 27 bp, Artificial Sequence
  Description of Artificial Sequence: Synthetic oligonucleotide
swmcaaagctacagtbhccctcctact

SEQ ID NO: 2389 - DNA, 27 bp, Artificial Sequence
  Description of Artificial Sequence: Synthetic oligonucleotide
  modified_base (8)..(8): a, c, t or g
cagswmvnatacagtactcctcctact

SEQ ID NO: 2390 - DNA, 27 bp, Artificial Sequence
  Description of Artificial Sequence: Synthetic oligonucleotide
cagswmagcbhcagtactcctcctact

SEQ ID NO: 2391 - DNA, 27 bp, Artificial Sequence
  Description of Artificial Sequence: Synthetic oligonucleotide
  modified_base (13)..(13): a, c, t or g
cagswmagctacnhcactcctcctact

SEQ ID NO: 2392 - DNA, 27 bp, Artificial Sequence
  Description of Artificial Sequence: Synthetic oligonucleotide
cagswmagctacagtbhccctcctact

SEQ ID NO: 2393 - DNA, 27 bp, Artificial Sequence
  Description of Artificial Sequence: Synthetic oligonucleotide
dtsswmgcactccagactccttwcact

SEQ ID NO: 2394 - DNA, 27 bp, Artificial Sequence
  Description of Artificial Sequence: Synthetic oligonucleotide
  modified_base (8)..(8): a, c, t or g
  modified_base (11)..(11): a, c, t or g
atgcagvnamnacagactccttwcact

SEQ ID NO: 2395 - DNA, 27 bp, Artificial Sequence
  Description of Artificial Sequence: Synthetic oligonucleotide
  modified_base (8)..(8): a, c, t or g
atgcagvnactcsrmactccttwcact

SEQ ID NO: 2396 - DNA, 27 bp, Artificial Sequence
  Description of Artificial Sequence: Synthetic oligonucleotide
  modified_base (8)..(8): a, c, t or g
atgcagvnactccagvbcccttwcact

SEQ ID NO: 2397 - DNA, 27 bp, Artificial Sequence
  Description of Artificial Sequence: Synthetic oligonucleotide
  modified_base (11)..(11): a, c, t or g
atgcaggcamnasrmactccttwcact

SEQ ID NO: 2398 - DNA, 27 bp, Artificial Sequence
  Description of Artificial Sequence: Synthetic oligonucleotide
  modified_base (11)..(11): a, c, t or g
atgcaggcamnacagvbcccttwcact

SEQ ID NO: 2399 - DNA, 27 bp, Artificial Sequence
  Description of Artificial Sequence: Synthetic oligonucleotide
atgcaggcactcsrmvbcccttwcact

SEQ ID NO: 2400 - DNA, 27 bp, Artificial Sequence
  Description of Artificial Sequence: Synthetic oligonucleotide
  modified_base (8)..(8): a, c, t or g
dtscagvnactccagactccttwcact

SEQ ID NO: 2401 - DNA, 27 bp, Artificial Sequence
  Description of Artificial Sequence: Synthetic oligonucleotide
  modified_base (11)..(11): a, c, t or g
dtscaggcamnacagactccttwcact

SEQ ID NO: 2402 - DNA, 27 bp, Artificial Sequence
  Description of Artificial Sequence: Synthetic oligonucleotide
dtscaggcactcsrmactccttwcact

SEQ ID NO: 2403 - DNA, 27 bp, Artificial Sequence
  Description of Artificial Sequence: Synthetic oligonucleotide
dtscaggcactccagvbcccttwcact

SEQ ID NO: 2404 - DNA, 27 bp, Artificial Sequence
  Description of Artificial Sequence: Synthetic oligonucleotide
  modified_base (8)..(8): a, c, t or g
atgswmvnactccagactccttwcact

SEQ ID NO: 2405 - DNA, 27 bp, Artificial Sequence
  Description of Artificial Sequence: Synthetic oligonucleotide
  modified_base (11)..(11): a, c, t or g
atgswmgcamnacagactccttwcact

SEQ ID NO: 2406 - DNA, 27 bp, Artificial Sequence
  Description of Artificial Sequence: Synthetic oligonucleotide
atgswmgcactcsrmactccttwcact

SEQ ID NO: 2407 - DNA, 27 bp, Artificial Sequence
  Description of Artificial Sequence: Synthetic oligonucleotide
atgswmgcactccagvbcccttwcact

SEQ ID NO: 2408 - DNA, 27 bp, Artificial Sequence
  Description of Artificial Sequence: Synthetic oligonucleotide
dtsswmgcactccagactcctmtcact

SEQ ID NO: 2409 - DNA, 27 bp, Artificial Sequence
  Description of Artificial Sequence: Synthetic oligonucleotide
  modified_base (8)..(8): a, c, t or g
  modified_base (11)..(11): a, c, t or g
atgcagvnamnacagactcctmtcact

SEQ ID NO: 2410 - DNA, 27 bp, Artificial Sequence
  Description of Artificial Sequence: Synthetic oligonucleotide
  modified_base (8)..(8): a, c, t or g
atgcagvnactcsrmactcctmtcact

SEQ ID NO: 2411 - DNA, 27 bp, Artificial Sequence
  Description of Artificial Sequence: Synthetic oligonucleotide
  modified_base (8)..(8): a, c, t or g
atgcagvnactccagvbccctmtcact

SEQ ID NO: 2412 - DNA, 27 bp, Artificial Sequence
  Description of Artificial Sequence: Synthetic oligonucleotide
  modified_base (11)..(11): a, c, t or g
atgcaggcamnasrmactcctmtcact

SEQ ID NO: 2413 - DNA, 27 bp, Artificial Sequence
  Description of Artificial Sequence: Synthetic oligonucleotide
  modified_base (11)..(11): a, c, t or g
atgcaggcamnacagvbccctmtcact

SEQ ID NO: 2414 - DNA, 27 bp, Artificial Sequence
  Description of Artificial Sequence: Synthetic oligonucleotide
atgcaggcactcsrmvbccctmtcact

SEQ ID NO: 2415 - DNA, 27 bp, Artificial Sequence
  Description of Artificial Sequence: Synthetic oligonucleotide
  modified_base (8)..(8): a, c, t or g
dtscagvnactccagactcctmtcact

SEQ ID NO: 2416 - DNA, 27 bp, Artificial Sequence
  Description of Artificial Sequence: Synthetic oligonucleotide
  modified_base (11)..(11): a, c, t or g
dtscaggcamnacagactcctmtcact

SEQ ID NO: 2417 - DNA, 27 bp, Artificial Sequence
  Description of Artificial Sequence: Synthetic oligonucleotide
dtscaggcactcsrmactcctmtcact

SEQ ID NO: 2418 - DNA, 27 bp, Artificial Sequence
  Description of Artificial Sequence: Synthetic oligonucleotide
dtscaggcactccagvbccctmtcact

SEQ ID NO: 2419 - DNA, 27 bp, Artificial Sequence
  Description of Artificial Sequence: Synthetic oligonucleotide
  modified_base (8)..(8): a, c, t or g
atgswmvnactccagactcctmtcact

SEQ ID NO: 2420 - DNA, 27 bp, Artificial Sequence
  Description of Artificial Sequence: Synthetic oligonucleotide
  modified_base (11)..(11): a, c, t or g
atgswmgcamnacagactcctmtcact

SEQ ID NO: 2421 - DNA, 27 bp, Artificial Sequence
  Description of Artificial Sequence: Synthetic oligonucleotide
atgswmgcactcsrmactcctmtcact

SEQ ID NO: 2422 - DNA, 27 bp, Artificial Sequence
  Description of Artificial Sequence: Synthetic oligonucleotide
atgswmgcactccagvbccctmtcact

SEQ ID NO: 2423 - DNA, 27 bp, Artificial Sequence
  Description of Artificial Sequence: Synthetic oligonucleotide
dtsswmgcactccagactcctwggact

SEQ ID NO: 2424 - DNA, 27 bp, Artificial Sequence
  Description of Artificial Sequence: Synthetic oligonucleotide
  modified_base (8)..(8): a, c, t or g
  modified_base (11)..(11): a, c, t or g
atgcagvnamnacagactcctwggact

SEQ ID NO: 2425 - DNA, 27 bp, Artificial Sequence
  Description of Artificial Sequence: Synthetic oligonucleotide
  modified_base (8)..(8): a, c, t or g
atgcagvnactcsrmactcctwggact

SEQ ID NO: 2426 - DNA, 27 bp, Artificial Sequence
  Description of Artificial Sequence: Synthetic oligonucleotide
  modified_base (8)..(8): a, c, t or g
atgcagvnactccagvbccctwggact

SEQ ID NO: 2427 - DNA, 27 bp, Artificial Sequence
  Description of Artificial Sequence: Synthetic oligonucleotide
  modified_base (11)..(11): a, c, t or g
atgcaggcamnasrmactcctwggact

SEQ ID NO: 2428 - DNA, 27 bp, Artificial Sequence
  Description of Artificial Sequence: Synthetic oligonucleotide
  modified_base (11)..(11): a, c, t or g
atgcaggcamnacagvbccctwggact

SEQ ID NO: 2429 - DNA, 27 bp, Artificial Sequence
  Description of Artificial Sequence: Synthetic oligonucleotide
atgcaggcactcsrmvbccctwggact

SEQ ID NO: 2430 - DNA, 27 bp, Artificial Sequence
  Description of Artificial Sequence: Synthetic oligonucleotide
  modified_base (8)..(8): a, c, t or g
dtscagvnactccagactcctwggact

SEQ ID NO: 2431 - DNA, 27 bp, Artificial Sequence
  Description of Artificial Sequence: Synthetic oligonucleotide
  modified_base (11)..(11): a, c, t or g
dtscaggcamnacagactcctwggact

SEQ ID NO: 2432 - DNA, 27 bp, Artificial Sequence
  Description of Artificial Sequence: Synthetic oligonucleotide
dtscaggcactcsrmactcctwggact

SEQ ID NO: 2433 - DNA, 27 bp, Artificial Sequence
  Description of Artificial Sequence: Synthetic oligonucleotide
dtscaggcactccagvbccctwggact

SEQ ID NO: 2434 - DNA, 27 bp, Artificial Sequence
  Description of Artificial Sequence: Synthetic oligonucleotide
  modified_base (8)..(8): a, c, t or g
atgswmvnactccagactcctwggact

SEQ ID NO: 2435 - DNA, 27 bp, Artificial Sequence
  Description of Artificial Sequence: Synthetic oligonucleotide
  modified_base (11)..(11): a, c, t or g
atgswmgcamnacagactcctwggact

SEQ ID NO: 2436 - DNA, 27 bp, Artificial Sequence
  Description of Artificial Sequence: Synthetic oligonucleotide
atgswmgcactcsrmactcctwggact

SEQ ID NO: 2437 - DNA, 27 bp, Artificial Sequence
  Description of Artificial Sequence: Synthetic oligonucleotide
atgswmgcactccagvbccctwggact

SEQ ID NO: 2438 - DNA, 27 bp, Artificial Sequence
  Description of Artificial Sequence: Synthetic oligonucleotide
dtsswmgcactccagactcctcctact

SEQ ID NO: 2439 - DNA, 27 bp, Artificial Sequence
  Description of Artificial Sequence: Synthetic oligonucleotide
  modified_base (8)..(8): a, c, t or g
  modified_base (11)..(11): a, c, t or g
atgcagvnamnacagactcctcctact

SEQ ID NO: 2440 - DNA, 27 bp, Artificial Sequence
  Description of Artificial Sequence: Synthetic oligonucleotide
  modified_base (8)..(8): a, c, t or g
atgcagvnactcsrmactcctcctact

SEQ ID NO: 2441 - DNA, 27 bp, Artificial Sequence
  Description of Artificial Sequence: Synthetic oligonucleotide
  modified_base (8)..(8): a, c, t or g
atgcagvnactccagvbccctcctact

SEQ ID NO: 2442 - DNA, 27 bp, Artificial Sequence
  Description of Artificial Sequence: Synthetic oligonucleotide
  modified_base (11)..(11): a, c, t or g
atgcaggcamnasrmactcctcctact

SEQ ID NO: 2443 - DNA, 27 bp, Artificial Sequence
  Description of Artificial Sequence: Synthetic oligonucleotide
  modified_base (11)..(11): a, c, t or g
atgcaggcamnacagvbccctcctact

SEQ ID NO: 2444 - DNA, 27 bp, Artificial Sequence
  Description of Artificial Sequence: Synthetic oligonucleotide
atgcaggcactcsrmvbccctcctact

SEQ ID NO: 2445 - DNA, 27 bp, Artificial Sequence
  Description of Artificial Sequence: Synthetic oligonucleotide
  modified_base (8)..(8): a, c, t or g
dtscagvnactccagactcctcctact

SEQ ID NO: 2446 - DNA, 27 bp, Artificial Sequence
  Description of Artificial Sequence: Synthetic oligonucleotide
  modified_base (11)..(11): a, c, t or g
dtscaggcamnacagactcctcctact

SEQ ID NO: 2447 - DNA, 27 bp, Artificial Sequence
  Description of Artificial Sequence: Synthetic oligonucleotide
dtscaggcactcsrmactcctcctact

SEQ ID NO: 2448 - DNA, 27 bp, Artificial Sequence
  Description of Artificial Sequence: Synthetic oligonucleotide
dtscaggcactccagvbccctcctact

SEQ ID NO: 2449 - DNA, 27 bp, Artificial Sequence
  Description of Artificial Sequence: Synthetic oligonucleotide
  modified_base (8)..(8): a, c, t or g
atgswmvnactccagactcctcctact

SEQ ID NO: 2450 - DNA, 27 bp, Artificial Sequence
  Description of Artificial Sequence: Synthetic oligonucleotide
  modified_base (11)..(11): a, c, t or g
atgswmgcamnacagactcctcctact

SEQ ID NO: 2451 - DNA, 27 bp, Artificial Sequence
  Description of Artificial Sequence: Synthetic oligonucleotide
atgswmgcactcsrmactcctcctact

SEQ ID NO: 2452 - DNA, 27 bp, Artificial Sequence
  Description of Artificial Sequence: Synthetic oligonucleotide
atgswmgcactccagvbccctcctact

SEQ ID NO: 2453 - DNA, 27 bp, Artificial Sequence
  Description of Artificial Sequence: Synthetic oligonucleotide
swmswmagaagtaattggccttwcact

SEQ ID NO: 2454 - DNA, 27 bp, Artificial Sequence
  Description of Artificial Sequence: Synthetic oligonucleotide
  modified_base (10)..(10): a, c, t or g
cagcagbhcnhcaattggccttwcact

SEQ ID NO: 2455 - DNA, 27 bp, Artificial Sequence
  Description of Artificial Sequence: Synthetic oligonucleotide
  modified_base (13)..(13): a, c, t or g
cagcagbhcagtnhctggccttwcact

SEQ ID NO: 2456 - DNA, 27 bp, Artificial Sequence
  Description of Artificial Sequence: Synthetic oligonucleotide
cagcagbhcagtaatywcccttwcact

SEQ ID NO: 2457 - DNA, 27 bp, Artificial Sequence
  Description of Artificial Sequence: Synthetic oligonucleotide
  modified_base (10)..(10): a, c, t or g
  modified_base (13)..(13): a, c, t or g
cagcagaganhcnhctggccttwcact

SEQ ID NO: 2458 - DNA, 27 bp, Artificial Sequence
  Description of Artificial Sequence: Synthetic oligonucleotide
  modified_base (10)..(10): a, c, t or g
cagcagaganhcaatywcccttwcact

SEQ ID NO: 2459 - DNA, 27 bp, Artificial Sequence
  Description of Artificial Sequence: Synthetic oligonucleotide
  modified_base (13)..(13): a, c, t or g
cagcagagaagtnhcywcccttwcact

SEQ ID NO: 2460 - DNA, 27 bp, Artificial Sequence
  Description of Artificial Sequence: Synthetic oligonucleotide
swmcagbhcagtaattggccttwcact

SEQ ID NO: 2461 - DNA, 27 bp, Artificial Sequence
  Description of Artificial Sequence: Synthetic oligonucleotide
  modified_base (10)..(10): a, c, t or g
swmcagaganhcaattggccttwcact

SEQ ID NO: 2462 - DNA, 27 bp, Artificial Sequence
  Description of Artificial Sequence: Synthetic oligonucleotide
  modified_base (13)..(13): a, c, t or g
swmcagagaagtnhctggccttwcact

SEQ ID NO: 2463 - DNA, 27 bp, Artificial Sequence
  Description of Artificial Sequence: Synthetic oligonucleotide
swmcagagaagtaatywcccttwcact

SEQ ID NO: 2464 - DNA, 27 bp, Artificial Sequence
  Description of Artificial Sequence: Synthetic oligonucleotide
cagswmbhcagtaattggccttwcact

SEQ ID NO: 2465 - DNA, 27 bp, Artificial Sequence
  Description of Artificial Sequence: Synthetic oligonucleotide
  modified_base (10)..(10): a, c, t or g
cagswmaganhcaattggccttwcact

SEQ ID NO: 2466 - DNA, 27 bp, Artificial Sequence
  Description of Artificial Sequence: Synthetic oligonucleotide
  modified_base (13)..(13): a, c, t or g
cagswmagaagtnhctggccttwcact

SEQ ID NO: 2467 - DNA, 27 bp, Artificial Sequence
  Description of Artificial Sequence: Synthetic oligonucleotide
cagswmagaagtaatywcccttwcact

SEQ ID NO: 2468 - DNA, 27 bp, Artificial Sequence
  Description of Artificial Sequence: Synthetic oligonucleotide
swmswmagaagtaattggcctmtcact

SEQ ID NO: 2469 - DNA, 27 bp, Artificial Sequence
  Description of Artificial Sequence: Synthetic oligonucleotide
  modified_base (10)..(10): a, c, t or g
cagcagbhcnhcaattggcctmtcact

SEQ ID NO: 2470 - DNA, 27 bp, Artificial Sequence
  Description of Artificial Sequence: Synthetic oligonucleotide
  modified_base (13)..(13): a, c, t or g
cagcagbhcagtnhctggcctmtcact

SEQ ID NO: 2471 - DNA, 27 bp, Artificial Sequence
  Description of Artificial Sequence: Synthetic oligonucleotide
cagcagbhcagtaatywccctmtcact

SEQ ID NO: 2472 - DNA, 27 bp, Artificial Sequence
  Description of Artificial Sequence: Synthetic oligonucleotide
  modified_base (10)..(10): a, c, t or g
  modified_base (13)..(13): a, c, t or g
cagcagaganhcnhctggcctmtcact

SEQ ID NO: 2473 - DNA, 27 bp, Artificial Sequence
  Description of Artificial Sequence: Synthetic oligonucleotide
  modified_base (10)..(10): a, c, t or g
cagcagaganhcaatywccctmtcact

SEQ ID NO: 2474 - DNA, 27 bp, Artificial Sequence
  Description of Artificial Sequence: Synthetic oligonucleotide
  modified_base (13)..(13): a, c, t or g
cagcagagaagtnhcywccctmtcact

SEQ ID NO: 2475 - DNA, 27 bp, Artificial Sequence
  Description of Artificial Sequence: Synthetic oligonucleotide
swmcagbhcagtaattggcctmtcact

SEQ ID NO: 2476 - DNA, 27 bp, Artificial Sequence
  Description of Artificial Sequence: Synthetic oligonucleotide
  modified_base (10)..(10): a, c, t or g
swmcagaganhcaattggcctmtcact

SEQ ID NO: 2477 - DNA, 27 bp, Artificial Sequence
  Description of Artificial Sequence: Synthetic oligonucleotide
  modified_base (13)..(13): a, c, t or g
swmcagagaagtnhctggcctmtcact

SEQ ID NO: 2478 - DNA, 27 bp, Artificial Sequence
  Description of Artificial Sequence: Synthetic oligonucleotide
swmcagagaagtaatywccctmtcact

SEQ ID NO: 2479 - DNA, 27 bp, Artificial Sequence
  Description of Artificial Sequence: Synthetic oligonucleotide
cagswmbhcagtaattggcctmtcact

SEQ ID NO: 2480 - DNA, 27 bp, Artificial Sequence
  Description of Artificial Sequence: Synthetic oligonucleotide
  modified_base (10)..(10): a, c, t or g
cagswmaganhcaattggcctmtcact

SEQ ID NO: 2481 - DNA, 27 bp, Artificial Sequence
  Description of Artificial Sequence: Synthetic oligonucleotide
  modified_base (13)..(13): a, c, t or g
cagswmagaagtnhctggcctmtcact

SEQ ID NO: 2482 - DNA, 27 bp, Artificial Sequence
  Description of Artificial Sequence: Synthetic oligonucleotide
cagswmagaagtaatywccctmtcact

SEQ ID NO: 2483 - DNA, 27 bp, Artificial Sequence
  Description of Artificial Sequence: Synthetic oligonucleotide
swmswmagaagtaattggcctwggact

SEQ ID NO: 2484 - DNA, 27 bp, Artificial Sequence
  Description of Artificial Sequence: Synthetic oligonucleotide
  modified_base (10)..(10): a, c, t or g
cagcagbhcnhcaattggcctwggact

SEQ ID NO: 2485 - DNA, 27 bp, Artificial Sequence
  Description of Artificial Sequence: Synthetic oligonucleotide
  modified_base (13)..(13): a, c, t or g
cagcagbhcagtnhctggcctwggact

SEQ ID NO: 2486 - DNA, 27 bp, Artificial Sequence
  Description of Artificial Sequence: Synthetic oligonucleotide
cagcagbhcagtaatywccctwggact

SEQ ID NO: 2487 - DNA, 27 bp, Artificial Sequence
  Description of Artificial Sequence: Synthetic oligonucleotide
  modified_base (10)..(10): a, c, t or g
  modified_base (13)..(13): a, c, t or g
cagcagaganhcnhctggcctwggact

SEQ ID NO: 2488 - DNA, 27 bp, Artificial Sequence
  Description of Artificial Sequence: Synthetic oligonucleotide
  modified_base (10)..(10): a, c, t or g
cagcagaganhcaatywccctwggact

SEQ ID NO: 2489 - DNA, 27 bp, Artificial Sequence
  Description of Artificial Sequence: Synthetic oligonucleotide
  modified_base (13)..(13): a, c, t or g
cagcagagaagtnhcywccctwggact

SEQ ID NO: 2490 - DNA, 27 bp, Artificial Sequence
  Description of Artificial Sequence: Synthetic oligonucleotide
swmcagbhcagtaattggcctwggact

SEQ ID NO: 2491 - DNA, 27 bp, Artificial Sequence
  Description of Artificial Sequence: Synthetic oligonucleotide
  modified_base (10)..(10): a, c, t or g
swmcagaganhcaattggcctwggact

SEQ ID NO: 2492 - DNA, 27 bp, Artificial Sequence
  Description of Artificial Sequence: Synthetic oligonucleotide
  modified_base (13)..(13): a, c, t or g
swmcagagaagtnhctggcctwggact

SEQ ID NO: 2493 - DNA, 27 bp, Artificial Sequence
  Description of Artificial Sequence: Synthetic oligonucleotide
swmcagagaagtaatywccctwggact

SEQ ID NO: 2494 - DNA, 27 bp, Artificial Sequence
  Description of Artificial Sequence: Synthetic oligonucleotide
cagswmbhcagtaattggcctwggact

SEQ ID NO: 2495 - DNA, 27 bp, Artificial Sequence
  Description of Artificial Sequence: Synthetic oligonucleotide
  modified_base (10)..(10): a, c, t or g
cagswmaganhcaattggcctwggact

SEQ ID NO: 2496 - DNA, 27 bp, Artificial Sequence
  Description of Artificial Sequence: Synthetic oligonucleotide
  modified_base (13)..(13): a, c, t or g
cagswmagaagtnhctggcctwggact

SEQ ID NO: 2497 - DNA, 27 bp, Artificial Sequence
  Description of Artificial Sequence: Synthetic oligonucleotide
cagswmagaagtaatywccctwggact

SEQ ID NO: 2498 - DNA, 27 bp, Artificial Sequence
  Description of Artificial Sequence: Synthetic oligonucleotide
swmswmagaagtaattggcctcctact

SEQ ID NO: 2499 - DNA, 27 bp, Artificial Sequence
  Description of Artificial Sequence: Synthetic oligonucleotide
  modified_base (10)..(10): a, c, t or g
cagcagbhcnhcaattggcctcctact

SEQ ID NO: 2500 - DNA, 27 bp, Artificial Sequence
  Description of Artificial Sequence: Synthetic oligonucleotide
  modified_base (13)..(13): a, c, t or g
cagcagbhcagtnhctggcctcctact

SEQ ID NO: 2501 - DNA, 27 bp, Artificial Sequence
  Description of Artificial Sequence: Synthetic oligonucleotide
cagcagbhcagtaatywccctcctact

SEQ ID NO: 2502 - DNA, 27 bp, Artificial Sequence
  Description of Artificial Sequence: Synthetic oligonucleotide
  modified_base (10)..(10): a, c, t or g
  modified_base (13)..(13): a, c, t or g
cagcagaganhcnhctggcctcctact

SEQ ID NO: 2503 - DNA, 27 bp, Artificial Sequence
  Description of Artificial Sequence: Synthetic oligonucleotide
  modified_base (10)..(10): a, c, t or g
cagcagaganhcaatywccctcctact

SEQ ID NO: 2504 - DNA, 27 bp, Artificial Sequence
  Description of Artificial Sequence: Synthetic oligonucleotide
  modified_base (13)..(13): a, c, t or g
cagcagagaagtnhcywccctcctact

SEQ ID NO: 2505 - DNA, 27 bp, Artificial Sequence
  Description of Artificial Sequence: Synthetic oligonucleotide
swmcagbhcagtaattggcctcctact

SEQ ID NO: 2506 - DNA, 27 bp, Artificial Sequence
  Description of Artificial Sequence: Synthetic oligonucleotide
  modified_base (10)..(10): a, c, t or g
swmcagaganhcaattggcctcctact

SEQ ID NO: 2507 - DNA, 27 bp, Artificial Sequence
  Description of Artificial Sequence: Synthetic oligonucleotide
  modified_base (13)..(13): a, c, t or g
swmcagagaagtnhctggcctcctact

SEQ ID NO: 2508 - DNA, 27 bp, Artificial Sequence
  Description of Artificial Sequence: Synthetic oligonucleotide
swmcagagaagtaatywccctcctact

SEQ ID NO: 2509 - DNA, 27 bp, Artificial Sequence
  Description of Artificial Sequence: Synthetic oligonucleotide
cagswmbhcagtaattggcctcctact

SEQ ID NO: 2510 - DNA, 27 bp, Artificial Sequence
  Description of Artificial Sequence: Synthetic oligonucleotide
  modified_base (10)..(10): a, c, t or g
cagswmaganhcaattggcctcctact

SEQ ID NO: 2511 - DNA, 27 bp, Artificial Sequence
  Description of Artificial Sequence: Synthetic oligonucleotide
  modified_base (13)..(13): a, c, t or g
cagswmagaagtnhctggcctcctact

SEQ ID NO: 2512 - DNA, 27 bp, Artificial Sequence
  Description of Artificial Sequence: Synthetic oligonucleotide
cagswmagaagtaatywccctcctact

SEQ ID NO: 2513 - DNA, 27 bp, Artificial Sequence
  Description of Artificial Sequence: Synthetic oligonucleotide
swmswmtacaataattggccttwcact

SEQ ID NO: 2514 - DNA, 27 bp, Artificial Sequence
  Description of Artificial Sequence: Synthetic oligonucleotide
  modified_base (13)..(13): a, c, t or g
cagcagbhcaatnhctggccttwcact

SEQ ID NO: 2515 - DNA, 27 bp, Artificial Sequence
  Description of Artificial Sequence: Synthetic oligonucleotide
cagcagbhcaataatywcccttwcact

SEQ ID NO: 2516 - DNA, 27 bp, Artificial Sequence
  Description of Artificial Sequence: Synthetic oligonucleotide
  modified_base (10)..(10): a, c, t or g
  modified_base (13)..(13): a, c, t or g
cagcagtacnhcnhctggccttwcact

SEQ ID NO: 2517 - DNA, 27 bp, Artificial Sequence
  Description of Artificial Sequence: Synthetic oligonucleotide
  modified_base (13)..(13): a, c, t or g
cagcagtacaatnhcywcccttwcact

SEQ ID NO: 2518 - DNA, 27 bp, Artificial Sequence
  Description of Artificial Sequence: Synthetic oligonucleotide
swmcagbhcaataattggccttwcact

SEQ ID NO: 2519 - DNA, 27 bp, Artificial Sequence
  Description of Artificial Sequence: Synthetic oligonucleotide
  modified_base (10)..(10): a, c, t or g
swmcagtacnhcaattggccttwcact

SEQ ID NO: 2520 - DNA, 27 bp, Artificial Sequence
  Description of Artificial Sequence: Synthetic oligonucleotide
  modified_base (13)..(13): a, c, t or g
swmcagtacaatnhctggccttwcact

SEQ ID NO: 2521 - DNA, 27 bp, Artificial Sequence
  Description of Artificial Sequence: Synthetic oligonucleotide
swmcagtacaataatywcccttwcact

SEQ ID NO: 2522 - DNA, 27 bp, Artificial Sequence
  Description of Artificial Sequence: Synthetic oligonucleotide
cagswmbhcaataattggccttwcact

SEQ ID NO: 2523 - DNA, 27 bp, Artificial Sequence
  Description of Artificial Sequence: Synthetic oligonucleotide
  modified_base (10)..(10): a, c, t or g
cagswmtacnhcaattggccttwcact

SEQ ID NO: 2524 - DNA, 27 bp, Artificial Sequence
  Description of Artificial Sequence: Synthetic oligonucleotide
  modified_base (13)..(13): a, c, t or g
cagswmtacaatnhctggccttwcact

SEQ ID NO: 2525 - DNA, 27 bp, Artificial Sequence
  Description of Artificial Sequence: Synthetic oligonucleotide
cagswmtacaataatywcccttwcact

SEQ ID NO: 2526 - DNA, 27 bp, Artificial Sequence
  Description of Artificial Sequence: Synthetic oligonucleotide
swmswmtacaataattggcctmtcact

SEQ ID NO: 2527 - DNA, 27 bp, Artificial Sequence
  Description of Artificial Sequence: Synthetic oligonucleotide
  modified_base (13)..(13): a, c, t or g
cagcagbhcaatnhctggcctmtcact

SEQ ID NO: 2528 - DNA, 27 bp, Artificial Sequence
  Description of Artificial Sequence: Synthetic oligonucleotide
cagcagbhcaataatywccctmtcact

SEQ ID NO: 2529 - DNA, 27 bp, Artificial Sequence
  Description of Artificial Sequence: Synthetic oligonucleotide
  modified_base (10)..(10): a, c, t or g
  modified_base (13)..(13): a, c, t or g
cagcagtacnhcnhctggcctmtcact

SEQ ID NO: 2530 - DNA, 27 bp, Artificial Sequence
  Description of Artificial Sequence: Synthetic oligonucleotide
  modified_base (13)..(13): a, c, t or g
cagcagtacaatnhcywccctmtcact

SEQ ID NO: 2531 - DNA, 27 bp, Artificial Sequence
  Description of Artificial Sequence: Synthetic oligonucleotide
swmcagbhcaataattggcctmtcact

SEQ ID NO: 2532 - DNA, 27 bp, Artificial Sequence
  Description of Artificial Sequence: Synthetic oligonucleotide
  modified_base (10)..(10): a, c, t or g
swmcagtacnhcaattggcctmtcact

SEQ ID NO: 2533 - DNA, 27 bp, Artificial Sequence
  Description of Artificial Sequence: Synthetic oligonucleotide
  modified_base (13)..(13): a, c, t or g
swmcagtacaatnhctggcctmtcact

SEQ ID NO: 2534 - DNA, 27 bp, Artificial Sequence
  Description of Artificial Sequence: Synthetic oligonucleotide
swmcagtacaataatywccctmtcact

SEQ ID NO: 2535 - DNA, 27 bp, Artificial Sequence
  Description of Artificial Sequence: Synthetic oligonucleotide
cagswmbhcaataattggcctmtcact

SEQ ID NO: 2536 - DNA, 27 bp, Artificial Sequence
  Description of Artificial Sequence: Synthetic oligonucleotide
  modified_base (10)..(10): a, c, t or g
cagswmtacnhcaattggcctmtcact

SEQ ID NO: 2537 - DNA, 27 bp, Artificial Sequence
  Description of Artificial Sequence: Synthetic oligonucleotide
  modified_base (13)..(13): a, c, t or g
cagswmtacaatnhctggcctmtcact

SEQ ID NO: 2538 - DNA, 27 bp, Artificial Sequence
  Description of Artificial Sequence: Synthetic oligonucleotide
cagswmtacaataatywccctmtcact

SEQ ID NO: 2539 - DNA, 27 bp, Artificial Sequence
  Description of Artificial Sequence: Synthetic oligonucleotide
swmswmtacaataattggcctwggact

SEQ ID NO: 2540 - DNA, 27 bp, Artificial Sequence
  Description of Artificial Sequence: Synthetic oligonucleotide
  modified_base (13)..(13): a, c, t or g
cagcagbhcaatnhctggcctwggact

SEQ ID NO: 2541 - DNA, 27 bp, Artificial Sequence
  Description of Artificial Sequence: Synthetic oligonucleotide
cagcagbhcaataatywccctwggact

SEQ ID NO: 2542 - DNA, 27 bp, Artificial Sequence
  Description of Artificial Sequence: Synthetic oligonucleotide
  modified_base (10)..(10): a, c, t or g
  modified_base (13)..(13): a, c, t or g
cagcagtacnhcnhctggcctwggact

SEQ ID NO: 2543 - DNA, 27 bp, Artificial Sequence
  Description of Artificial Sequence: Synthetic oligonucleotide
  modified_base (13)..(13): a, c, t or g
cagcagtacaatnhcywccctwggact

SEQ ID NO: 2544 - DNA, 27 bp, Artificial Sequence
  Description of Artificial Sequence: Synthetic oligonucleotide
swmcagbhcaataattggcctwggact

SEQ ID NO: 2545 - DNA, 27 bp, Artificial Sequence
  Description of Artificial Sequence: Synthetic oligonucleotide
  modified_base (10)..(10): a, c, t or g
swmcagtacnhcaattggcctwggact

SEQ ID NO: 2546 - DNA, 27 bp, Artificial Sequence
  Description of Artificial Sequence: Synthetic oligonucleotide
  modified_base (13)..(13): a, c, t or g
swmcagtacaatnhctggcctwggact

SEQ ID NO: 2547 - DNA, 27 bp, Artificial Sequence
  Description of Artificial Sequence: Synthetic oligonucleotide
swmcagtacaataatywccctwggact

SEQ ID NO: 2548 - DNA, 27 bp, Artificial Sequence
  Description of Artificial Sequence: Synthetic oligonucleotide
cagswmbhcaataattggcctwggact

SEQ ID NO: 2549 - DNA, 27 bp, Artificial Sequence
  Description of Artificial Sequence: Synthetic oligonucleotide
  modified_base (10)..(10): a, c, t or g
cagswmtacnhcaattggcctwggact

SEQ ID NO: 2550 - DNA, 27 bp, Artificial Sequence
  Description of Artificial Sequence: Synthetic oligonucleotide
  modified_base (13)..(13): a, c, t or g
cagswmtacaatnhctggcctwggact

SEQ ID NO: 2551 - DNA, 27 bp, Artificial Sequence
  Description of Artificial Sequence: Synthetic oligonucleotide
cagswmtacaataatywccctwggact

SEQ ID NO: 2552 - DNA, 27 bp, Artificial Sequence
  Description of Artificial Sequence: Synthetic oligonucleotide
swmswmtacaataattggcctcctact

SEQ ID NO: 2553 - DNA, 27 bp, Artificial Sequence
  Description of Artificial Sequence: Synthetic oligonucleotide
  modified_base (13)..(13): a, c, t or g
cagcagbhcaatnhctggcctcctact

SEQ ID NO: 2554 - DNA, 27 bp, Artificial Sequence
  Description of Artificial Sequence: Synthetic oligonucleotide
cagcagbhcaataatywccctcctact

SEQ ID NO: 2555 - DNA, 27 bp, Artificial Sequence
  Description of Artificial Sequence: Synthetic oligonucleotide
  modified_base (10)..(10): a, c, t or g
  modified_base (13)..(13): a, c, t or g
cagcagtacnhcnhctggcctcctact

SEQ ID NO: 2556 - DNA, 27 bp, Artificial Sequence
  Description of Artificial Sequence: Synthetic oligonucleotide
  modified_base (13)..(13): a, c, t or g
cagcagtacaatnhcywccctcctact

SEQ ID NO: 2557 - DNA, 27 bp, Artificial Sequence
  Description of Artificial Sequence: Synthetic oligonucleotide
swmcagbhcaataattggcctcctact

SEQ ID NO: 2558 - DNA, 27 bp, Artificial Sequence
  Description of Artificial Sequence: Synthetic oligonucleotide
  modified_base (10)..(10): a, c, t or g
swmcagtacnhcaattggcctcctact

SEQ ID NO: 2559 - DNA, 27 bp, Artificial Sequence
  Description of Artificial Sequence: Synthetic oligonucleotide
  modified_base (13)..(13): a, c, t or g
swmcagtacaatnhctggcctcctact

SEQ ID NO: 2560 - DNA, 27 bp, Artificial Sequence
  Description of Artificial Sequence: Synthetic oligonucleotide
swmcagtacaataatywccctcctact

SEQ ID NO: 2561 - DNA, 27 bp, Artificial Sequence
  Description of Artificial Sequence: Synthetic oligonucleotide
cagswmbhcaataattggcctcctact

SEQ ID NO: 2562 - DNA, 27 bp, Artificial Sequence
  Description of Artificial Sequence: Synthetic oligonucleotide
  modified_base (10)..(10): a, c, t or g
cagswmtacnhcaattggcctcctact

SEQ ID NO: 2563 - DNA, 27 bp, Artificial Sequence
  Description of Artificial Sequence: Synthetic oligonucleotide
  modified_base (13)..(13): a, c, t or g
cagswmtacaatnhctggcctcctact

SEQ ID NO: 2564 - DNA, 27 bp, Artificial Sequence
  Description of Artificial Sequence: Synthetic oligonucleotide
cagswmtacaataatywccctcctact

SEQ ID NO: 2565 - DNA, 27 bp, Artificial Sequence
  Description of Artificial Sequence: Synthetic oligonucleotide
swmswmtacggaagtagtccttwcact

SEQ ID NO: 2566 - DNA, 27 bp, Artificial Sequence
  Description of Artificial Sequence: Synthetic oligonucleotide
cagcagbhcbhcagtagtccttwcact

SEQ ID NO: 2567 - DNA, 27 bp, Artificial Sequence
  Description of Artificial Sequence: Synthetic oligonucleotide
  modified_base (14)..(14): a, c, t or g
cagcagbhcggavncagtccttwcact

SEQ ID NO: 2568 - DNA, 27 bp, Artificial Sequence
  Description of Artificial Sequence: Synthetic oligonucleotide
cagcagbhcggaagtbhcccttwcact

SEQ ID NO: 2569 - DNA, 27 bp, Artificial Sequence
  Description of Artificial Sequence: Synthetic oligonucleotide
  modified_base (14)..(14): a, c, t or g
cagcagtacbhcvncagtccttwcact

SEQ ID NO: 2570 - DNA, 27 bp, Artificial Sequence
  Description of Artificial Sequence: Synthetic oligonucleotide
cagcagtacbhcagtbhcccttwcact

SEQ ID NO: 2571 - DNA, 27 bp, Artificial Sequence
  Description of Artificial Sequence: Synthetic oligonucleotide
  modified_base (14)..(14): a, c, t or g
cagcagtacggavncbhcccttwcact

SEQ ID NO: 2572 - DNA, 27 bp, Artificial Sequence
  Description of Artificial Sequence: Synthetic oligonucleotide
swmcagbhcggaagtagtccttwcact

SEQ ID NO: 2573 - DNA, 27 bp, Artificial Sequence
  Description of Artificial Sequence: Synthetic oligonucleotide
swmcagtacbhcagtagtccttwcact

SEQ ID NO: 2574 - DNA, 27 bp, Artificial Sequence
  Description of Artificial Sequence: Synthetic oligonucleotide
  modified_base (14)..(14): a, c, t or g
swmcagtacggavncagtccttwcact

SEQ ID NO: 2575 - DNA, 27 bp, Artificial Sequence
  Description of Artificial Sequence: Synthetic oligonucleotide
swmcagtacggaagtbhcccttwcact

SEQ ID NO: 2576 - DNA, 27 bp, Artificial Sequence
  Description of Artificial Sequence: Synthetic oligonucleotide
cagswmbhcggaagtagtccttwcact

SEQ ID NO: 2577 - DNA, 27 bp, Artificial Sequence
  Description of Artificial Sequence: Synthetic oligonucleotide
cagswmtacbhcagtagtccttwcact

SEQ ID NO: 2578 - DNA, 27 bp, Artificial Sequence
  Description of Artificial Sequence: Synthetic oligonucleotide
  modified_base (14)..(14): a, c, t or g
cagswmtacggavncagtccttwcact

SEQ ID NO: 2579 - DNA, 27 bp, Artificial Sequence
  Description of Artificial Sequence: Synthetic oligonucleotide
cagswmtacggaagtbhcccttwcact

SEQ ID NO: 2580 - DNA, 27 bp, Artificial Sequence
  Description of Artificial Sequence: Synthetic oligonucleotide
swmswmtacggaagtagtcctmtcact

SEQ ID NO: 2581 - DNA, 27 bp, Artificial Sequence
  Description of Artificial Sequence: Synthetic oligonucleotide
cagcagbhcbhcagtagtcctmtcact

SEQ ID NO: 2582 - DNA, 27 bp, Artificial Sequence
  Description of Artificial Sequence: Synthetic oligonucleotide
  modified_base (14)..(14): a, c, t or g
cagcagbhcggavncagtcctmtcact

SEQ ID NO: 2583 - DNA, 27 bp, Artificial Sequence
  Description of Artificial Sequence: Synthetic oligonucleotide
cagcagbhcggaagtbhccctmtcact

SEQ ID NO: 2584 - DNA, 27 bp, Artificial Sequence
  Description of Artificial Sequence: Synthetic oligonucleotide
  modified_base (14)..(14): a, c, t or g
cagcagtacbhcvncagtcctmtcact

SEQ ID NO: 2585 - DNA, 27 bp, Artificial Sequence
  Description of Artificial Sequence: Synthetic oligonucleotide
cagcagtacbhcagtbhccctmtcact

SEQ ID NO: 2586 - DNA, 27 bp, Artificial Sequence
  Description of Artificial Sequence: Synthetic oligonucleotide
  modified_base (14)..(14): a, c, t or g
cagcagtacggavncbhccctmtcact

SEQ ID NO: 2587 - DNA, 27 bp, Artificial Sequence
  Description of Artificial Sequence: Synthetic oligonucleotide
swmcagbhcggaagtagtcctmtcact

SEQ ID NO: 2588 - DNA, 27 bp, Artificial Sequence
  Description of Artificial Sequence: Synthetic oligonucleotide
swmcagtacbhcagtagtcctmtcact

SEQ ID NO: 2589 - DNA, 27 bp, Artificial Sequence
  Description of Artificial Sequence: Synthetic oligonucleotide
  modified_base (14)..(14): a, c, t or g
swmcagtacggavncagtcctmtcact

SEQ ID NO: 2590 - DNA, 27 bp, Artificial Sequence
  Description of Artificial Sequence: Synthetic oligonucleotide
swmcagtacggaagtbhccctmtcact

SEQ ID NO: 2591 - DNA, 27 bp, Artificial Sequence
  Description of Artificial Sequence: Synthetic oligonucleotide
cagswmbhcggaagtagtcctmtcact

SEQ ID NO: 2592 - DNA, 27 bp, Artificial Sequence
  Description of Artificial Sequence: Synthetic oligonucleotide
cagswmtacbhcagtagtcctmtcact

SEQ ID NO: 2593 - DNA, 27 bp, Artificial Sequence
  Description of Artificial Sequence: Synthetic oligonucleotide
  modified_base (14)..(14): a, c, t or g
cagswmtacggavncagtcctmtcact

SEQ ID NO: 2594 - DNA, 27 bp, Artificial Sequence
  Description of Artificial Sequence: Synthetic oligonucleotide
cagswmtacggaagtbhccctmtcact

SEQ ID NO: 2595 - DNA, 27 bp, Artificial Sequence
  Description of Artificial Sequence: Synthetic oligonucleotide
swmswmtacggaagtagtcctwggact

SEQ ID NO: 2596 - DNA, 27 bp, Artificial Sequence
  Description of Artificial Sequence: Synthetic oligonucleotide
cagcagbhcbhcagtagtcctwggact

SEQ ID NO: 2597 - DNA, 27 bp, Artificial Sequence
  Description of Artificial Sequence: Synthetic oligonucleotide
  modified_base (14)..(14): a, c, t or g
cagcagbhcggavncagtcctwggact

SEQ ID NO: 2598 - DNA, 27 bp, Artificial Sequence
  Description of Artificial Sequence: Synthetic oligonucleotide
cagcagbhcggaagtbhccctwggact

SEQ ID NO: 2599 - DNA, 27 bp, Artificial Sequence
  Description of Artificial Sequence: Synthetic oligonucleotide
  modified_base (14)..(14): a, c, t or g
cagcagtacbhcvncagtcctwggact

SEQ ID NO: 2600 - DNA, 27 bp, Artificial Sequence
  Description of Artificial Sequence: Synthetic oligonucleotide
cagcagtacbhcagtbhccctwggact

SEQ ID NO: 2601 - DNA, 27 bp, Artificial Sequence
  Description of Artificial Sequence: Synthetic oligonucleotide
  modified_base (14)..(14): a, c, t or g
cagcagtacggavncbhccctwggact

SEQ ID NO: 2602 - DNA, 27 bp, Artificial Sequence
  Description of Artificial Sequence: Synthetic oligonucleotide
swmcagbhcggaagtagtcctwggact

SEQ ID NO: 2603 - DNA, 27 bp, Artificial Sequence
  Description of Artificial Sequence: Synthetic oligonucleotide
swmcagtacbhcagtagtcctwggact

SEQ ID NO: 2604 - DNA, 27 bp, Artificial Sequence
  Description of Artificial Sequence: Synthetic oligonucleotide
  modified_base (14)..(14): a, c, t or g
swmcagtacggavncagtcctwggact

SEQ ID NO: 2605 - DNA, 27 bp, Artificial Sequence
  Description of Artificial Sequence: Synthetic oligonucleotide
swmcagtacggaagtbhccctwggact

SEQ ID NO: 2606 - DNA, 27 bp, Artificial Sequence
  Description of Artificial Sequence: Synthetic oligonucleotide
cagswmbhcggaagtagtcctwggact

SEQ ID NO: 2607 - DNA, 27 bp, Artificial Sequence
  Description of Artificial Sequence: Synthetic oligonucleotide
cagswmtacbhcagtagtcctwggact

SEQ ID NO: 2608 - DNA, 27 bp, Artificial Sequence
  Description of Artificial Sequence: Synthetic oligonucleotide
  modified_base (14)..(14): a, c, t or g
cagswmtacggavncagtcctwggact

SEQ ID NO: 2609 - DNA, 27 bp, Artificial Sequence
  Description of Artificial Sequence: Synthetic oligonucleotide
cagswmtacggaagtbhccctwggact

SEQ ID NO: 2610 - DNA, 27 bp, Artificial Sequence
  Description of Artificial Sequence: Synthetic oligonucleotide
swmswmtacggaagtagtcctcctact

SEQ ID NO: 2611 - DNA, 27 bp, Artificial Sequence
  Description of Artificial Sequence: Synthetic oligonucleotide
cagcagbhcbhcagtagtcctcctact

SEQ ID NO: 2612 - DNA, 27 bp, Artificial Sequence
  Description of Artificial Sequence: Synthetic oligonucleotide
  modified_base (14)..(14): a, c, t or g
cagcagbhcggavncagtcctcctact

SEQ ID NO: 2613 - DNA, 27 bp, Artificial Sequence
  Description of Artificial Sequence: Synthetic oligonucleotide
cagcagbhcggaagtbhccctcctact

SEQ ID NO: 2614 - DNA, 27 bp, Artificial Sequence
  Description of Artificial Sequence: Synthetic oligonucleotide
  modified_base (14)..(14): a, c, t or g
cagcagtacbhcvncagtcctcctact

SEQ ID NO: 2615 - DNA, 27 bp, Artificial Sequence
  Description of Artificial Sequence: Synthetic oligonucleotide
cagcagtacbhcagtbhccctcctact

SEQ ID NO: 2616 - DNA, 27 bp, Artificial Sequence
  Description of Artificial Sequence: Synthetic oligonucleotide
  modified_base (14)..(14): a, c, t or g
cagcagtacggavncbhccctcctact

SEQ ID NO: 2617 - DNA, 27 bp, Artificial Sequence
  Description of Artificial Sequence: Synthetic oligonucleotide
swmcagbhcggaagtagtcctcctact

SEQ ID NO: 2618 - DNA, 27 bp, Artificial Sequence
  Description of Artificial Sequence: Synthetic oligonucleotide
swmcagtacbhcagtagtcctcctact

SEQ ID NO: 2619 - DNA, 27 bp, Artificial Sequence
  Description of Artificial Sequence: Synthetic oligonucleotide
  modified_base (14)..(14): a, c, t or g
swmcagtacggavncagtcctcctact

SEQ ID NO: 2620 - DNA, 27 bp, Artificial Sequence
  Description of Artificial Sequence: Synthetic oligonucleotide
swmcagtacggaagtbhccctcctact

SEQ ID NO: 2621 - DNA, 27 bp, Artificial Sequence
  Description of Artificial Sequence: Synthetic oligonucleotide
cagswmbhcggaagtagtcctcctact

SEQ ID NO: 2622 - DNA, 27 bp, Artificial Sequence
  Description of Artificial Sequence: Synthetic oligonucleotide
cagswmtacbhcagtagtcctcctact

SEQ ID NO: 2623 - DNA, 27 bp, Artificial Sequence
  Description of Artificial Sequence: Synthetic oligonucleotide
  modified_base (14)..(14): a, c, t or g
cagswmtacggavncagtcctcctact

SEQ ID NO: 2624 - DNA, 27 bp, Artificial Sequence
  Description of Artificial Sequence: Synthetic oligonucleotide
cagswmtacggaagtbhccctcctact

SEQ ID NO: 2625 - DNA, 27 bp, Artificial Sequence
  Description of Artificial Sequence: Synthetic oligonucleotide
cagcagbhcvrmmbctacycttwcact

SEQ ID NO: 2626 - DNA, 27 bp, Artificial Sequence
  Description of Artificial Sequence: Synthetic oligonucleotide
cagcagbhcvrmmbctacyctmtcact

SEQ ID NO: 2627 - DNA, 27 bp, Artificial Sequence
  Description of Artificial Sequence: Synthetic oligonucleotide
cagcagbhcvrmmbctacyctwggact

SEQ ID NO: 2628 - DNA, 27 bp, Artificial Sequence
  Description of Artificial Sequence: Synthetic oligonucleotide
cagcagbhcvrmmbctacyctcctact

SEQ ID NO: 2629 - DNA, 27 bp, Artificial Sequence
  Description of Artificial Sequence: Synthetic oligonucleotide
cagcagbhcaatmbcywcycttwcact

SEQ ID NO: 2630 - DNA, 27 bp, Artificial Sequence
  Description of Artificial Sequence: Synthetic oligonucleotide
cagcagbhcaatmbcywcyctmtcact

SEQ ID NO: 2631 - DNA, 27 bp, Artificial Sequence
  Description of Artificial Sequence: Synthetic oligonucleotide
cagcagbhcaatmbcywcyctwggact

SEQ ID NO: 2632 - DNA, 27 bp, Artificial Sequence
  Description of Artificial Sequence: Synthetic oligonucleotide
cagcagbhcaatmbcywcyctcctact

SEQ ID NO: 2633 - DNA, 27 bp, Artificial Sequence
  Description of Artificial Sequence: Synthetic oligonucleotide
cagcagbhcvrmagtywcycttwcact

SEQ ID NO: 2634 - DNA, 27 bp, Artificial Sequence
  Description of Artificial Sequence: Synthetic oligonucleotide
cagcagbhcvrmagtywcyctmtcact

SEQ ID NO: 2635 - DNA, 27 bp, Artificial Sequence
  Description of Artificial Sequence: Synthetic oligonucleotide
cagcagbhcvrmagtywcyctwggact

SEQ ID NO: 2636 - DNA, 27 bp, Artificial Sequence
  Description of Artificial Sequence: Synthetic oligonucleotide
cagcagbhcvrmagtywcyctcctact

SEQ ID NO: 2637 - DNA, 27 bp, Artificial Sequence
  Description of Artificial Sequence: Synthetic oligonucleotide
cagcagtacvrmmbcywcycttwcact

SEQ ID NO: 2638 - DNA, 27 bp, Artificial Sequence
  Description of Artificial Sequence: Synthetic oligonucleotide
cagcagtacvrmmbcywcyctmtcact

SEQ ID NO: 2639 - DNA, 27 bp, Artificial Sequence
  Description of Artificial Sequence: Synthetic oligonucleotide
cagcagtacvrmmbcywcyctwggact

SEQ ID NO: 2640 - DNA, 27 bp, Artificial Sequence
  Description of Artificial Sequence: Synthetic oligonucleotide
cagcagtacvrmmbcywcyctcctact

SEQ ID NO: 2641 - DNA, 27 bp, Artificial Sequence
  Description of Artificial Sequence: Synthetic oligonucleotide
  modified_base (8)..(8): a, c, t or g
  modified_base (10)..(10): a, c, t or g
  modified_base (13)..(13): a, c, t or g
cagcagrnanhcnhcttcccttwcact

SEQ ID NO: 2642 - DNA, 27 bp, Artificial Sequence
  Description of Artificial Sequence: Synthetic oligonucleotide
  modified_base (8)..(8): a, c, t or g
  modified_base (10)..(10): a, c, t or g
  modified_base (13)..(13): a, c, t or g
cagcagrnanhcnhcttccctmtcact

SEQ ID NO: 2643 - DNA, 27 bp, Artificial Sequence
  Description of Artificial Sequence: Synthetic oligonucleotide
  modified_base (8)..(8): a, c, t or g
  modified_base (10)..(10): a, c, t or g
  modified_base (13)..(13): a, c, t or g
cagcagrnanhcnhcttccctwggact

SEQ ID NO: 2644 - DNA, 27 bp, Artificial Sequence
  Description of Artificial Sequence: Synthetic oligonucleotide
  modified_base (8)..(8): a, c, t or g
  modified_base (10)..(10): a, c, t or g
  modified_base (13)..(13): a, c, t or g
cagcagrnanhcnhcttccctcctact

SEQ ID NO: 2645 - DNA, 27 bp, Artificial Sequence
  Description of Artificial Sequence: Synthetic oligonucleotide
  modified_base (8)..(8): a, c, t or g
  modified_base (10)..(10): a, c, t or g
cagcagrnanhcagtywcccttwcact

SEQ ID NO: 2646 - DNA, 27 bp, Artificial Sequence
  Description of Artificial Sequence: Synthetic oligonucleotide
  modified_base (8)..(8): a, c, t or g
  modified_base (10)..(10): a, c, t or g
cagcagrnanhcagtywccctmtcact

SEQ ID NO: 2647 - DNA, 27 bp, Artificial Sequence
  Description of Artificial Sequence: Synthetic oligonucleotide
  modified_base (8)..(8): a, c, t or g
  modified_base (10)..(10): a, c, t or g
cagcagrnanhcagtywccctwggact

SEQ ID NO: 2648 - DNA, 27 bp, Artificial Sequence
  Description of Artificial Sequence: Synthetic oligonucleotide
  modified_base (8)..(8): a, c, t or g
  modified_base (10)..(10): a, c, t or g
cagcagrnanhcagtywccctcctact

SEQ ID NO: 2649 - DNA, 27 bp, Artificial Sequence
  Description of Artificial Sequence: Synthetic oligonucleotide
  modified_base (8)..(8): a, c, t or g
  modified_base (13)..(13): a, c, t or g
cagcagrnaaatnhcywcccttwcact

SEQ ID NO: 2650 - DNA, 27 bp, Artificial Sequence
  Description of Artificial Sequence: Synthetic oligonucleotide
  modified_base (8)..(8): a, c, t or g
  modified_base (13)..(13): a, c, t or g
cagcagrnaaatnhcywccctmtcact

SEQ ID NO: 2651 - DNA, 27 bp, Artificial Sequence
  Description of Artificial Sequence: Synthetic oligonucleotide
  modified_base (8)..(8): a, c, t or g
  modified_base (13)..(13): a, c, t or g
cagcagrnaaatnhcywccctwggact

SEQ ID NO: 2652 - DNA, 27 bp, Artificial Sequence
  Description of Artificial Sequence: Synthetic oligonucleotide
  modified_base (8)..(8): a, c, t or g
  modified_base (13)..(13): a, c, t or g
cagcagrnaaatnhcywccctcctact

SEQ ID NO: 2653 - DNA, 27 bp, Artificial Sequence
  Description of Artificial Sequence: Synthetic oligonucleotide
  modified_base (10)..(10): a, c, t or g
  modified_base (13)..(13): a, c, t or g
cagcaggcanhcnhcywcccttwcact

SEQ ID NO: 2654 - DNA, 27 bp, Artificial Sequence
  Description of Artificial Sequence: Synthetic oligonucleotide
  modified_base (10)..(10): a, c, t or g
  modified_base (13)..(13): a, c, t or g
cagcaggcanhcnhcywccctmtcact

SEQ ID NO: 2655 - DNA, 27 bp, Artificial Sequence
  Description of Artificial Sequence: Synthetic oligonucleotide
  modified_base (10)..(10): a, c, t or g
  modified_base (13)..(13): a, c, t or g
cagcaggcanhcnhcywccctwggact

SEQ ID NO: 2656 - DNA, 27 bp, Artificial Sequence
  Description of Artificial Sequence: Synthetic oligonucleotide
  modified_base (10)..(10): a, c, t or g
  modified_base (13)..(13): a, c, t or g
cagcaggcanhcnhcywccctcctact

SEQ ID NO: 2657 - DNA, 27 bp, Artificial Sequence
  Description of Artificial Sequence: Synthetic oligonucleotide
  modified_base (10)..(10): a, c, t or g
  modified_base (13)..(13): a, c, t or g
cagcagbhcnhcnhcctcccttwcact

SEQ ID NO: 2658 - DNA, 27 bp, Artificial Sequence
  Description of Artificial Sequence: Synthetic oligonucleotide
  modified_base (10)..(10): a, c, t or g
  modified_base (13)..(13): a, c, t or g
cagcagbhcnhcnhcctccctmtcact

SEQ ID NO: 2659 - DNA, 27 bp, Artificial Sequence
  Description of Artificial Sequence: Synthetic oligonucleotide
  modified_base (10)..(10): a, c, t or g
  modified_base (13)..(13): a, c, t or g
cagcagbhcnhcnhcctccctwggact

SEQ ID NO: 2660 - DNA, 27 bp, Artificial Sequence
  Description of Artificial Sequence: Synthetic oligonucleotide
  modified_base (10)..(10): a, c, t or g
  modified_base (13)..(13): a, c, t or g
cagcagbhcnhcnhcctccctcctact

SEQ ID NO: 2661 - DNA, 27 bp, Artificial Sequence
  Description of Artificial Sequence: Synthetic oligonucleotide
  modified_base (10)..(10): a, c, t or g
cagcagbhcnhcaatywcccttwcact

SEQ ID NO: 2662 - DNA, 27 bp, Artificial Sequence
  Description of Artificial Sequence: Synthetic oligonucleotide
  modified_base (10)..(10): a, c, t or g
cagcagbhcnhcaatywccctmtcact

SEQ ID NO: 2663 - DNA, 27 bp, Artificial Sequence
  Description of Artificial Sequence: Synthetic oligonucleotide
  modified_base (10)..(10): a, c, t or g
cagcagbhcnhcaatywccctwggact

SEQ ID NO: 2664 - DNA, 27 bp, Artificial Sequence
  Description of Artificial Sequence: Synthetic oligonucleotide
  modified_base (10)..(10): a, c, t or g
cagcagbhcnhcaatywccctcctact

SEQ ID NO: 2665 - DNA, 27 bp, Artificial Sequence
  Description of Artificial Sequence: Synthetic oligonucleotide
  modified_base (13)..(13): a, c, t or g
cagcagbhcgatnhcywcccttwcact

SEQ ID NO: 2666 - DNA, 27 bp, Artificial Sequence
  Description of Artificial Sequence: Synthetic oligonucleotide
  modified_base (13)..(13): a, c, t or g
cagcagbhcgatnhcywccctmtcact

SEQ ID NO: 2667 - DNA, 27 bp, Artificial Sequence
  Description of Artificial Sequence: Synthetic oligonucleotide
  modified_base (13)..(13): a, c, t or g
cagcagbhcgatnhcywccctwggact

SEQ ID NO: 2668 - DNA, 27 bp, Artificial Sequence
  Description of Artificial Sequence: Synthetic oligonucleotide
  modified_base (13)..(13): a, c, t or g
cagcagbhcgatnhcywccctcctact

SEQ ID NO: 2669 - DNA, 27 bp, Artificial Sequence
  Description of Artificial Sequence: Synthetic oligonucleotide
  modified_base (10)..(10): a, c, t or g
  modified_base (13)..(13): a, c, t or g
cagcagtacnhcnhcywcccttwcact

SEQ ID NO: 2670 - DNA, 27 bp, Artificial Sequence
  Description of Artificial Sequence: Synthetic oligonucleotide
  modified_base (10)..(10): a, c, t or g
  modified_base (13)..(13): a, c, t or g
cagcagtacnhcnhcywccctmtcact

SEQ ID NO: 2671 - DNA, 27 bp, Artificial Sequence
  Description of Artificial Sequence: Synthetic oligonucleotide
  modified_base (10)..(10): a, c, t or g
  modified_base (13)..(13): a, c, t or g
cagcagtacnhcnhcywccctwggact

SEQ ID NO: 2672 - DNA, 27 bp, Artificial Sequence
  Description of Artificial Sequence: Synthetic oligonucleotide
  modified_base (10)..(10): a, c, t or g
  modified_base (13)..(13): a, c, t or g
cagcagtacnhcnhcywccctcctact

SEQ ID NO: 2673 - DNA, 27 bp, Artificial Sequence
  Description of Artificial Sequence: Synthetic oligonucleotide
  modified_base (8)..(8): a, c, t or g
  modified_base (13)..(13): a, c, t or g
cagcaavnabhcnhcactcctmtcact

SEQ ID NO: 2674 - DNA, 27 bp, Artificial Sequence
  Description of Artificial Sequence: Synthetic oligonucleotide
  modified_base (8)..(8): a, c, t or g
  modified_base (13)..(13): a, c, t or g
cagcaavnabhcnhcactcctwggact

SEQ ID NO: 2675 - DNA, 27 bp, Artificial Sequence
  Description of Artificial Sequence: Synthetic oligonucleotide
  modified_base (8)..(8): a, c, t or g
  modified_base (13)..(13): a, c, t or g
cagcaavnabhcnhcactcctcctact

SEQ ID NO: 2676 - DNA, 27 bp, Artificial Sequence
  Description of Artificial Sequence: Synthetic oligonucleotide
  modified_base (8)..(8): a, c, t or g
cagcaavnabhcagtbhccctmtcact

SEQ ID NO: 2677 - DNA, 27 bp, Artificial Sequence
  Description of Artificial Sequence: Synthetic oligonucleotide
  modified_base (8)..(8): a, c, t or g
cagcaavnabhcagtbhccctwggact

SEQ ID NO: 2678 - DNA, 27 bp, Artificial Sequence
  Description of Artificial Sequence: Synthetic oligonucleotide
  modified_base (8)..(8): a, c, t or g
cagcaavnabhcagtbhccctcctact

SEQ ID NO: 2679 - DNA, 27 bp, Artificial Sequence
  Description of Artificial Sequence: Synthetic oligonucleotide
  modified_base (8)..(8): a, c, t or g
  modified_base (13)..(13): a, c, t or g
cagcaavnatacnhcbhccctmtcact

SEQ ID NO: 2680 - DNA, 27 bp, Artificial Sequence
  Description of Artificial Sequence: Synthetic oligonucleotide
  modified_base (8)..(8): a, c, t or g
  modified_base (13)..(13): a, c, t or g
cagcaavnatacnhcbhccctwggact

SEQ ID NO: 2681 - DNA, 27 bp, Artificial Sequence
  Description of Artificial Sequence: Synthetic oligonucleotide
  modified_base (8)..(8): a, c, t or g
  modified_base (13)..(13): a, c, t or g
cagcaavnatacnhcbhccctcctact

SEQ ID NO: 2682 - DNA, 27 bp, Artificial Sequence
  Description of Artificial Sequence: Synthetic oligonucleotide
  modified_base (13)..(13): a, c, t or g
cagcaaagcbhcnhcbhccctmtcact

SEQ ID NO: 2683 - DNA, 27 bp, Artificial Sequence
  Description of Artificial Sequence: Synthetic oligonucleotide
  modified_base (13)..(13): a, c, t or g
cagcaaagcbhcnhcbhccctwggact

SEQ ID NO: 2684 - DNA, 27 bp, Artificial Sequence
  Description of Artificial Sequence: Synthetic oligonucleotide
  modified_base (13)..(13): a, c, t or g
cagcaaagcbhcnhcbhccctcctact

SEQ ID NO: 2685 - DNA, 27 bp, Artificial Sequence
  Description of Artificial Sequence: Synthetic oligonucleotide
  modified_base (8)..(8): a, c, t or g
  modified_base (11)..(11): a, c, t or g
atgcagvnamnasrmactccttwcact

SEQ ID NO: 2686 - DNA, 27 bp, Artificial Sequence
  Description of Artificial Sequence: Synthetic oligonucleotide
  modified_base (8)..(8): a, c, t or g
  modified_base (11)..(11): a, c, t or g
atgcagvnamnasrmactcctmtcact

SEQ ID NO: 2687 - DNA, 27 bp, Artificial Sequence
  Description of Artificial Sequence: Synthetic oligonucleotide
  modified_base (8)..(8): a, c, t or g
  modified_base (11)..(11): a, c, t or g
atgcagvnamnasrmactcctwggact

SEQ ID NO: 2688 - DNA, 27 bp, Artificial Sequence
  Description of Artificial Sequence: Synthetic oligonucleotide
  modified_base (8)..(8): a, c, t or g
  modified_base (11)..(11): a, c, t or g
atgcagvnamnasrmactcctcctact

SEQ ID NO: 2689 - DNA, 27 bp, Artificial Sequence
  Description of Artificial Sequence: Synthetic oligonucleotide
  modified_base (8)..(8): a, c, t or g
  modified_base (11)..(11): a, c, t or g
atgcagvnamnacagvbcccttwcact

SEQ ID NO: 2690 - DNA, 27 bp, Artificial Sequence
  Description of Artificial Sequence: Synthetic oligonucleotide
  modified_base (8)..(8): a, c, t or g
  modified_base (11)..(11): a, c, t or g
atgcagvnamnacagvbccctmtcact

SEQ ID NO: 2691 - DNA, 27 bp, Artificial Sequence
  Description of Artificial Sequence: Synthetic oligonucleotide
  modified_base (8)..(8): a, c, t or g
  modified_base (11)..(11): a, c, t or g
atgcagvnamnacagvbccctwggact

SEQ ID NO: 2692 - DNA, 27 bp, Artificial Sequence
  Description of Artificial Sequence: Synthetic oligonucleotide
  modified_base (8)..(8): a, c, t or g
  modified_base (11)..(11): a, c, t or g
atgcagvnamnacagvbccctcctact

SEQ ID NO: 2693 - DNA, 27 bp, Artificial Sequence
  Description of Artificial Sequence: Synthetic oligonucleotide
  modified_base (8)..(8): a, c, t or g
atgcagvnactcsrmvbcccttwcact

SEQ ID NO: 2694 - DNA, 27 bp, Artificial Sequence
  Description of Artificial Sequence: Synthetic oligonucleotide
  modified_base (8)..(8): a, c, t or g
atgcagvnactcsrmvbccctmtcact

SEQ ID NO: 2695 - DNA, 27 bp, Artificial Sequence
  Description of Artificial Sequence: Synthetic oligonucleotide
  modified_base (8)..(8): a, c, t or g
atgcagvnactcsrmvbccctwggact

SEQ ID NO: 2696 - DNA, 27 bp, Artificial Sequence
  Description of Artificial Sequence: Synthetic oligonucleotide
  modified_base (8)..(8): a, c, t or g
atgcagvnactcsrmvbccctcctact

SEQ ID NO: 2697 - DNA, 27 bp, Artificial Sequence
  Description of Artificial Sequence: Synthetic oligonucleotide
  modified_base (11)..(11): a, c, t or g
atgcaggcamnasrmvbcccttwcact

SEQ ID NO: 2698 - DNA, 27 bp, Artificial Sequence
  Description of Artificial Sequence: Synthetic oligonucleotide
  modified_base (11)..(11): a, c, t or g
atgcaggcamnasrmvbccctmtcact

SEQ ID NO: 2699 - DNA, 27 bp, Artificial Sequence
  Description of Artificial Sequence: Synthetic oligonucleotide
  modified_base (11)..(11): a, c, t or g
atgcaggcamnasrmvbccctwggact

SEQ ID NO: 2700 - DNA, 27 bp, Artificial Sequence
  Description of Artificial Sequence: Synthetic oligonucleotide
  modified_base (11)..(11): a, c, t or g
atgcaggcamnasrmvbccctcctact

SEQ ID NO: 2701 - DNA, 27 bp, Artificial Sequence
  Description of Artificial Sequence: Synthetic oligonucleotide
  modified_base (10)..(10): a, c, t or g
  modified_base (13)..(13): a, c, t or g
cagcagbhcnhcnhctggccttwcact

SEQ ID NO: 2702 - DNA, 27 bp, Artificial Sequence
  Description of Artificial Sequence: Synthetic oligonucleotide
  modified_base (10)..(10): a, c, t or g
  modified_base (13)..(13): a, c, t or g
cagcagbhcnhcnhctggcctmtcact

SEQ ID NO: 2703 - DNA, 27 bp, Artificial Sequence
  Description of Artificial Sequence: Synthetic oligonucleotide
  modified_base (10)..(10): a, c, t or g
  modified_base (13)..(13): a, c, t or g
cagcagbhcnhcnhctggcctwggact

SEQ ID NO: 2704 - DNA, 27 bp, Artificial Sequence
  Description of Artificial Sequence: Synthetic oligonucleotide
  modified_base (10)..(10): a, c, t or g
  modified_base (13)..(13): a, c, t or g
cagcagbhcnhcnhctggcctcctact

SEQ ID NO: 2705 - DNA, 27 bp, Artificial Sequence
  Description of Artificial Sequence: Synthetic oligonucleotide
  modified_base (13)..(13): a, c, t or g
cagcagbhcagtnhcywcccttwcact

SEQ ID NO: 2706 - DNA, 27 bp, Artificial Sequence
  Description of Artificial Sequence: Synthetic oligonucleotide
  modified_base (13)..(13): a, c, t or g
cagcagbhcagtnhcywccctmtcact

SEQ ID NO: 2707 - DNA, 27 bp, Artificial Sequence
  Description of Artificial Sequence: Synthetic oligonucleotide
  modified_base (13)..(13): a, c, t or g
cagcagbhcagtnhcywccctwggact

SEQ ID NO: 2708 - DNA, 27 bp, Artificial Sequence
  Description of Artificial Sequence: Synthetic oligonucleotide
  modified_base (13)..(13): a, c, t or g
cagcagbhcagtnhcywccctcctact

SEQ ID NO: 2709 - DNA, 27 bp, Artificial Sequence
  Description of Artificial Sequence: Synthetic oligonucleotide
  modified_base (10)..(10): a, c, t or g
  modified_base (13)..(13): a, c, t or g
cagcagaganhcnhcywcccttwcact

SEQ ID NO: 2710 - DNA, 27 bp, Artificial Sequence
  Description of Artificial Sequence: Synthetic oligonucleotide
  modified_base (10)..(10): a, c, t or g
  modified_base (13)..(13): a, c, t or g
cagcagaganhcnhcywccctmtcact

SEQ ID NO: 2711 - DNA, 27 bp, Artificial Sequence
  Description of Artificial Sequence: Synthetic oligonucleotide
  modified_base (10)..(10): a, c, t or g
  modified_base (13)..(13): a, c, t or g
cagcagaganhcnhcywccctwggact

SEQ ID NO: 2712 - DNA, 27 bp, Artificial Sequence
  Description of Artificial Sequence: Synthetic oligonucleotide
  modified_base (10)..(10): a, c, t or g
  modified_base (13)..(13): a, c, t or g
cagcagaganhcnhcywccctcctact

SEQ ID NO: 2713 - DNA, 27 bp, Artificial Sequence
  Description of Artificial Sequence: Synthetic oligonucleotide
  modified_base (13)..(13): a, c, t or g
cagcagbhcaatnhcywcccttwcact

SEQ ID NO: 2714 - DNA, 27 bp, Artificial Sequence
  Description of Artificial Sequence: Synthetic oligonucleotide
  modified_base (13)..(13): a, c, t or g
cagcagbhcaatnhcywccctmtcact

SEQ ID NO: 2715 - DNA, 27 bp, Artificial Sequence
  Description of Artificial Sequence: Synthetic oligonucleotide
  modified_base (13)..(13): a, c, t or g
cagcagbhcaatnhcywccctwggact

SEQ ID NO: 2716 - DNA, 27 bp, Artificial Sequence
  Description of Artificial Sequence: Synthetic oligonucleotide
  modified_base (13)..(13): a, c, t or g
cagcagbhcaatnhcywccctcctact

SEQ ID NO: 2717 - DNA, 27 bp, Artificial Sequence
  Description of Artificial Sequence: Synthetic oligonucleotide
  modified_base (14)..(14): a, c, t or g
cagcagbhcbhcvncagtccttwcact

SEQ ID NO: 2718 - DNA, 27 bp, Artificial Sequence
  Description of Artificial Sequence: Synthetic oligonucleotide
  modified_base (14)..(14): a, c, t or g
cagcagbhcbhcvncagtcctmtcact

SEQ ID NO: 2719 - DNA, 27 bp, Artificial Sequence
  Description of Artificial Sequence: Synthetic oligonucleotide
  modified_base (14)..(14): a, c, t or g
cagcagbhcbhcvncagtcctwggact

SEQ ID NO: 2720 - DNA, 27 bp, Artificial Sequence
  Description of Artificial Sequence: Synthetic oligonucleotide
  modified_base (14)..(14): a, c, t or g
cagcagbhcbhcvncagtcctcctact

SEQ ID NO: 2721 - DNA, 27 bp, Artificial Sequence
  Description of Artificial Sequence: Synthetic oligonucleotide
cagcagbhcbhcagtbhcccttwcact

SEQ ID NO: 2722 - DNA, 27 bp, Artificial Sequence
  Description of Artificial Sequence: Synthetic oligonucleotide
cagcagbhcbhcagtbhccctmtcact

SEQ ID NO: 2723 - DNA, 27 bp, Artificial Sequence
  Description of Artificial Sequence: Synthetic oligonucleotide
cagcagbhcbhcagtbhccctwggact

SEQ ID NO: 2724 - DNA, 27 bp, Artificial Sequence
  Description of Artificial Sequence: Synthetic oligonucleotide
cagcagbhcbhcagtbhccctcctact

SEQ ID NO: 2725 - DNA, 27 bp, Artificial Sequence
  Description of Artificial Sequence: Synthetic oligonucleotide
  modified_base (14)..(14): a, c, t or g
cagcagbhcggavncbhcccttwcact

SEQ ID NO: 2726 - DNA, 27 bp, Artificial Sequence
  Description of Artificial Sequence: Synthetic oligonucleotide
  modified_base (14)..(14): a, c, t or g
cagcagbhcggavncbhccctmtcact

SEQ ID NO: 2727 - DNA, 27 bp, Artificial Sequence
  Description of Artificial Sequence: Synthetic oligonucleotide
  modified_base (14)..(14): a, c, t or g
cagcagbhcggavncbhccctwggact

SEQ ID NO: 2728 - DNA, 27 bp, Artificial Sequence
  Description of Artificial Sequence: Synthetic oligonucleotide
  modified_base (14)..(14): a, c, t or g
cagcagbhcggavncbhccctcctact

SEQ ID NO: 2729 - DNA, 27 bp, Artificial Sequence
  Description of Artificial Sequence: Synthetic oligonucleotide
  modified_base (14)..(14): a, c, t or g
cagcagtacbhcvncbhcccttwcact

SEQ ID NO: 2730 - DNA, 27 bp, Artificial Sequence
  Description of Artificial Sequence: Synthetic oligonucleotide
  modified_base (14)..(14): a, c, t or g
cagcagtacbhcvncbhccctmtcact

SEQ ID NO: 2731 - DNA, 27 bp, Artificial Sequence
  Description of Artificial Sequence: Synthetic oligonucleotide
  modified_base (14)..(14): a, c, t or g
cagcagtacbhcvncbhccctwggact

SEQ ID NO: 2732 - DNA, 27 bp, Artificial Sequence
  Description of Artificial Sequence: Synthetic oligonucleotide
  modified_base (14)..(14): a, c, t or g
cagcagtacbhcvncbhccctcctact

SEQ ID NO: 2733 - DNA, 27 bp, Artificial Sequence
  Description of Artificial Sequence: Synthetic oligonucleotide
  modified_base (13)..(13): a, c, t or g
cagcagbhcbhcnhcactccttwcact

SEQ ID NO: 2734 - DNA, 27 bp, Artificial Sequence
  Description of Artificial Sequence: Synthetic oligonucleotide
  modified_base (13)..(13): a, c, t or g
cagcagbhcbhcnhcactcctmtcact

SEQ ID NO: 2735 - DNA, 27 bp, Artificial Sequence
  Description of Artificial Sequence: Synthetic oligonucleotide
  modified_base (13)..(13): a, c, t or g
cagcagbhcbhcnhcactcctwggact

SEQ ID NO: 2736 - DNA, 27 bp, Artificial Sequence
  Description of Artificial Sequence: Synthetic oligonucleotide
  modified_base (13)..(13): a, c, t or g
cagcagbhcbhcnhcactcctcctact

SEQ ID NO: 2737 - DNA, 27 bp, Artificial Sequence
  Description of Artificial Sequence: Synthetic oligonucleotide
  modified_base (13)..(13): a, c, t or g
cagcagbhctacnhcbhcccttwcact

SEQ ID NO: 2738 - DNA, 27 bp, Artificial Sequence
  Description of Artificial Sequence: Synthetic oligonucleotide
  modified_base (13)..(13): a, c, t or g
cagcagbhctacnhcbhccctmtcact

SEQ ID NO: 2739 - DNA, 27 bp, Artificial Sequence
  Description of Artificial Sequence: Synthetic oligonucleotide
  modified_base (13)..(13): a, c, t or g
cagcagbhctacnhcbhccctwggact

SEQ ID NO: 2740 - DNA, 27 bp, Artificial Sequence
  Description of Artificial Sequence: Synthetic oligonucleotide
  modified_base (13)..(13): a, c, t or g
cagcagbhctacnhcbhccctcctact

SEQ ID NO: 2741 - DNA, 27 bp, Artificial Sequence
  Description of Artificial Sequence: Synthetic oligonucleotide
  modified_base (13)..(13): a, c, t or g
cagcagtacbhcnhcbhcccttwcact

SEQ ID NO: 2742 - DNA, 27 bp, Artificial Sequence
  Description of Artificial Sequence: Synthetic oligonucleotide
  modified_base (13)..(13): a, c, t or g
cagcagtacbhcnhcbhccctmtcact

SEQ ID NO: 2743 - DNA, 27 bp, Artificial Sequence
  Description of Artificial Sequence: Synthetic oligonucleotide
  modified_base (13)..(13): a, c, t or g
cagcagtacbhcnhcbhccctwggact

SEQ ID NO: 2744 - DNA, 27 bp, Artificial Sequence
  Description of Artificial Sequence: Synthetic oligonucleotide
  modified_base (13)..(13): a, c, t or g
cagcagtacbhcnhcbhccctcctact

SEQ ID NO: 2745 - DNA, 75 bp, Artificial Sequence
  Description of Artificial Sequence: Synthetic oligonucleotide
cctgatgattttgcaacttattactgcswmswmtacaatagttacyctccttwcacttttggcggagggaccaag

SEQ ID NO: 2746 - DNA, 75 bp, Artificial Sequence
  Description of Artificial Sequence: Synthetic oligonucleotide
cctgatgattttgcaacttattactgccagcagbhcvrmagttacyctccttwcacttttggcggagggaccaag

SEQ ID NO: 2747 - DNA, 75 bp, Artificial Sequence
  Description of Artificial Sequence: Synthetic oligonucleotide
cctgatgattttgcaacttattactgccagcagbhcaatmbctacyctccttwcacttttggcggagggaccaag

SEQ ID NO: 2748 - DNA, 75 bp, Artificial Sequence
  Description of Artificial Sequence: Synthetic oligonucleotide
cctgatgattttgcaacttattactgccagcagbhcaatagtywcyctccttwcacttttggcggagggaccaag

SEQ ID NO: 2749 - DNA, 75 bp, Artificial Sequence
  Description of Artificial Sequence: Synthetic oligonucleotide
cctgatgattttgcaacttattactgccagcagtacvrmmbctacyctccttwcacttttggcggagggaccaag

SEQ ID NO: 2750 - DNA, 75 bp, Artificial Sequence
  Description of Artificial Sequence: Synthetic oligonucleotide
cctgatgattttgcaacttattactgccagcagtacvrmagtywcyctccttwcacttttggcggagggaccaag

SEQ ID NO: 2751 - DNA, 75 bp, Artificial Sequence
  Description of Artificial Sequence: Synthetic oligonucleotide
cctgatgattttgcaacttattactgccagcagtacaatmbcywcyctccttwcacttttggcggagggaccaag

SEQ ID NO: 2752 - DNA, 75 bp, Artificial Sequence
  Description of Artificial Sequence: Synthetic oligonucleotide
cctgatgattttgcaacttattactgcswmcagbhcaatagttacyctccttwcacttttggcggagggaccaag

SEQ ID NO: 2753 - DNA, 75 bp, Artificial Sequence
  Description of Artificial Sequence: Synthetic oligonucleotide
cctgatgattttgcaacttattactgcswmcagtacvrmagttacyctccttwcacttttggcggagggaccaag

SEQ ID NO: 2754 - DNA, 75 bp, Artificial Sequence
  Description of Artificial Sequence: Synthetic oligonucleotide
cctgatgattttgcaacttattactgcswmcagtacaatmbctacyctccttwcacttttggcggagggaccaag

SEQ ID NO: 2755 - DNA, 75 bp, Artificial Sequence
  Description of Artificial Sequence: Synthetic oligonucleotide
cctgatgattttgcaacttattactgcswmcagtacaatagtywcyctccttwcacttttggcggagggaccaag

SEQ ID NO: 2756 - DNA, 75 bp, Artificial Sequence
  Description of Artificial Sequence: Synthetic oligonucleotide
cctgatgattttgcaacttattactgccagswmbhcaatagttacyctccttwcacttttggcggagggaccaag

SEQ ID NO: 2757 - DNA, 75 bp, Artificial Sequence
  Description of Artificial Sequence: Synthetic oligonucleotide
cctgatgattttgcaacttattactgccagswmtacvrmagttacyctccttwcacttttggcggagggaccaag

SEQ ID NO: 2758 - DNA, 75 bp, Artificial Sequence
  Description of Artificial Sequence: Synthetic oligonucleotide
cctgatgattttgcaacttattactgccagswmtacaatmbctacyctccttwcacttttggcggagggaccaag

SEQ ID NO: 2759 - DNA, 75 bp, Artificial Sequence
  Description of Artificial Sequence: Synthetic oligonucleotide
cctgatgattttgcaacttattactgccagswmtacaatagtywcyctccttwcacttttggcggagggaccaag

SEQ ID NO: 2760 - DNA, 75 bp, Artificial Sequence
  Description of Artificial Sequence: Synthetic oligonucleotide
cctgatgattttgcaacttattactgcswmswmtacaatagttacyctcctmtcacttttggcggagggaccaag

SEQ ID NO: 2761 - DNA, 75 bp, Artificial Sequence
  Description of Artificial Sequence: Synthetic oligonucleotide
cctgatgattttgcaacttattactgccagcagbhcvrmagttacyctcctmtcacttttggcggagggaccaag

SEQ ID NO: 2762 - DNA, 75 bp, Artificial Sequence
  Description of Artificial Sequence: Synthetic oligonucleotide
cctgatgattttgcaacttattactgccagcagbhcaatmbctacyctcctmtcacttttggcggagggaccaag

SEQ ID NO: 2763 - DNA, 75 bp, Artificial Sequence
  Description of Artificial Sequence: Synthetic oligonucleotide
cctgatgattttgcaacttattactgccagcagbhcaatagtywcyctcctmtcacttttggcggagggaccaag

SEQ ID NO: 2764 - DNA, 75 bp, Artificial Sequence
  Description of Artificial Sequence: Synthetic oligonucleotide
cctgatgattttgcaacttattactgccagcagtacvrmmbctacyctcctmtcacttttggcggagggaccaag

SEQ ID NO: 2765 - DNA, 75 bp, Artificial Sequence
  Description of Artificial Sequence: Synthetic oligonucleotide
cctgatgattttgcaacttattactgccagcagtacvrmagtywcyctcctmtcacttttggcggagggaccaag

SEQ ID NO: 2766 - DNA, 75 bp, Artificial Sequence
  Description of Artificial Sequence: Synthetic oligonucleotide
cctgatgattttgcaacttattactgccagcagtacaatmbcywcyctcctmtcacttttggcggagggaccaag

SEQ ID NO: 2767 - DNA, 75 bp, Artificial Sequence
  Description of Artificial Sequence: Synthetic oligonucleotide
cctgatgattttgcaacttattactgcswmcagbhcaatagttacyctcctmtcacttttggcggagggaccaag

SEQ ID NO: 2768 - DNA, 75 bp, Artificial Sequence
  Description of Artificial Sequence: Synthetic oligonucleotide
cctgatgattttgcaacttattactgcswmcagtacvrmagttacyctcctmtcacttttggcggagggaccaag

SEQ ID NO: 2769 - DNA, 75 bp, Artificial Sequence
  Description of Artificial Sequence: Synthetic oligonucleotide
cctgatgattttgcaacttattactgcswmcagtacaatmbctacyctcctmtcacttttggcggagggaccaag

SEQ ID NO: 2770 - DNA, 75 bp, Artificial Sequence
  Description of Artificial Sequence: Synthetic oligonucleotide
cctgatgattttgcaacttattactgcswmcagtacaatagtywcyctcctmtcacttttggcggagggaccaag

SEQ ID NO: 2771 - DNA, 75 bp, Artificial Sequence
  Description of Artificial Sequence: Synthetic oligonucleotide
cctgatgattttgcaacttattactgccagswmbhcaatagttacyctcctmtcacttttggcggagggaccaag

SEQ ID NO: 2772 - DNA, 75 bp, Artificial Sequence
  Description of Artificial Sequence: Synthetic oligonucleotide
cctgatgattttgcaacttattactgccagswmtacvrmagttacyctcctmtcacttttggcggagggaccaag

SEQ ID NO: 2773 - DNA, 75 bp, Artificial Sequence
  Description of Artificial Sequence: Synthetic oligonucleotide
cctgatgattttgcaacttattactgccagswmtacaatmbctacyctcctmtcacttttggcggagggaccaag

SEQ ID NO: 2774 - DNA, 75 bp, Artificial Sequence
  Description of Artificial Sequence: Synthetic oligonucleotide
cctgatgattttgcaacttattactgccagswmtacaatagtywcyctcctmtcacttttggcggagggaccaag

SEQ ID NO: 2775 - DNA, 75 bp, Artificial Sequence
  Description of Artificial Sequence: Synthetic oligonucleotide
cctgatgattttgcaacttattactgcswmswmtacaatagttacyctcctwggacttttggcggagggaccaag

SEQ ID NO: 2776 - DNA, 75 bp, Artificial Sequence
  Description of Artificial Sequence: Synthetic oligonucleotide
cctgatgattttgcaacttattactgccagcagbhcvrmagttacyctcctwggacttttggcggagggaccaag

SEQ ID NO: 2777 - DNA, 75 bp, Artificial Sequence
  Description of Artificial Sequence: Synthetic oligonucleotide
cctgatgattttgcaacttattactgccagcagbhcaatmbctacyctcctwggacttttggcggagggaccaag

SEQ ID NO: 2778 - DNA, 75 bp, Artificial Sequence
  Description of Artificial Sequence: Synthetic oligonucleotide
cctgatgattttgcaacttattactgccagcagbhcaatagtywcyctcctwggacttttggcggagggaccaag

SEQ ID NO: 2779 - DNA, 75 bp, Artificial Sequence
  Description of Artificial Sequence: Synthetic oligonucleotide
cctgatgattttgcaacttattactgccagcagtacvrmmbctacyctcctwggacttttggcggagggaccaag

SEQ ID NO: 2780 - DNA, 75 bp, Artificial Sequence
  Description of Artificial Sequence: Synthetic oligonucleotide
cctgatgattttgcaacttattactgccagcagtacvrmagtywcyctcctwggacttttggcggagggaccaag

SEQ ID NO: 2781 - DNA, 75 bp, Artificial Sequence
  Description of Artificial Sequence: Synthetic oligonucleotide
cctgatgattttgcaacttattactgccagcagtacaatmbcywcyctcctwggacttttggcggagggaccaag

SEQ ID NO: 2782 - DNA, 75 bp, Artificial Sequence
  Description of Artificial Sequence: Synthetic oligonucleotide
cctgatgattttgcaacttattactgcswmcagbhcaatagttacyctcctwggacttttggcggagggaccaag

SEQ ID NO: 2783 - DNA, 75 bp, Artificial Sequence
  Description of Artificial Sequence: Synthetic oligonucleotide
cctgatgattttgcaacttattactgcswmcagtacvrmagttacyctcctwggacttttggcggagggaccaag

SEQ ID NO: 2784 - DNA, 75 bp, Artificial Sequence
  Description of Artificial Sequence: Synthetic oligonucleotide
cctgatgattttgcaacttattactgcswmcagtacaatmbctacyctcctwggacttttggcggagggaccaag

SEQ ID NO: 2785 - DNA, 75 bp, Artificial Sequence
  Description of Artificial Sequence: Synthetic oligonucleotide
cctgatgattttgcaacttattactgcswmcagtacaatagtywcyctcctwggacttttggcggagggaccaag

SEQ ID NO: 2786 - DNA, 75 bp, Artificial Sequence
  Description of Artificial Sequence: Synthetic oligonucleotide
cctgatgattttgcaacttattactgccagswmbhcaatagttacyctcctwggacttttggcggagggaccaag

SEQ ID NO: 2787 - DNA, 75 bp, Artificial Sequence
  Description of Artificial Sequence: Synthetic oligonucleotide
cctgatgattttgcaacttattactgccagswmtacvrmagttacyctcctwggacttttggcggagggaccaag

SEQ ID NO: 2788 - DNA, 75 bp, Artificial Sequence
  Description of Artificial Sequence: Synthetic oligonucleotide
cctgatgattttgcaacttattactgccagswmtacaatmbctacyctcctwggacttttggcggagggaccaag

SEQ ID NO: 2789 - DNA, 75 bp, Artificial Sequence
  Description of Artificial Sequence: Synthetic oligonucleotide
cctgatgattttgcaacttattactgccagswmtacaatagtywcyctcctwggacttttggcggagggaccaag

SEQ ID NO: 2790 - DNA, 75 bp, Artificial Sequence
  Description of Artificial Sequence: Synthetic oligonucleotide
cctgaagattttgcaacttattactgtswmswmgcaaatagtttccctccttwcacttttggcggagggaccaag

SEQ ID NO: 2791 - DNA, 75 bp, Artificial Sequence
  Description of Artificial Sequence: Synthetic oligonucleotide
  modified_base (35)..(35): a, c, t or g
  modified_base (37)..(37): a, c, t or g
cctgaagattttgcaacttattactgtcagcagrnanhcagtttccctccttwcacttttggcggagggaccaag

SEQ ID NO: 2792 - DNA, 75 bp, Artificial Sequence
  Description of Artificial Sequence: Synthetic oligonucleotide
  modified_base (35)..(35): a, c, t or g
  modified_base (40)..(40): a, c, t or g
cctgaagattttgcaacttattactgtcagcagrnaaatnhcttccctccttwcacttttggcggagggaccaag

SEQ ID NO: 2793 - DNA, 75 bp, Artificial Sequence
  Description of Artificial Sequence: Synthetic oligonucleotide
  modified_base (35)..(35): a, c, t or g
cctgaagattttgcaacttattactgtcagcagrnaaatagtywccctccttwcacttttggcggagggaccaag

SEQ ID NO: 2794 - DNA, 75 bp, Artificial Sequence
  Description of Artificial Sequence: Synthetic oligonucleotide
  modified_base (37)..(37): a, c, t or g
  modified_base (40)..(40): a, c, t or g
cctgaagattttgcaacttattactgtcagcaggcanhcnhcttccctccttwcacttttggcggagggaccaag

SEQ ID NO: 2795 - DNA, 75 bp, Artificial Sequence
  Description of Artificial Sequence: Synthetic oligonucleotide
  modified_base (37)..(37): a, c, t or g
cctgaagattttgcaacttattactgtcagcaggcanhcagtywccctccttwcacttttggcggagggaccaag

SEQ ID NO: 2796 - DNA, 75 bp, Artificial Sequence
  Description of Artificial Sequence: Synthetic oligonucleotide
  modified_base (40)..(40): a, c, t or g
cctgaagattttgcaacttattactgtcagcaggcaaatnhcywccctccttwcacttttggcggagggaccaag

SEQ ID NO: 2797 - DNA, 75 bp, Artificial Sequence
  Description of Artificial Sequence: Synthetic oligonucleotide
  modified_base (35)..(35): a, c, t or g
cctgaagattttgcaacttattactgtswmcagrnaaatagtttccctccttwcacttttggcggagggaccaag

SEQ ID NO: 2798 - DNA, 75 bp, Artificial Sequence
  Description of Artificial Sequence: Synthetic oligonucleotide
  modified_base (37)..(37): a, c, t or g
cctgaagattttgcaacttattactgtswmcaggcanhcagtttccctccttwcacttttggcggagggaccaag

SEQ ID NO: 2799 - DNA, 75 bp, Artificial Sequence
  Description of Artificial Sequence: Synthetic oligonucleotide
  modified_base (40)..(40): a, c, t or g
cctgaagattttgcaacttattactgtswmcaggcaaatnhcttccctccttwcacttttggcggagggaccaag

SEQ ID NO: 2800 - DNA, 75 bp, Artificial Sequence
  Description of Artificial Sequence: Synthetic oligonucleotide
cctgaagattttgcaacttattactgtswmcaggcaaatagtywccctccttwcacttttggcggagggaccaag

SEQ ID NO: 2801 - DNA, 75 bp, Artificial Sequence
  Description of Artificial Sequence: Synthetic oligonucleotide
  modified_base (35)..(35): a, c, t or g
cctgaagattttgcaacttattactgtcagswmrnaaatagtttccctccttwcacttttggcggagggaccaag

SEQ ID NO: 2802 - DNA, 75 bp, Artificial Sequence
  Description of Artificial Sequence: Synthetic oligonucleotide
  modified_base (37)..(37): a, c, t or g
cctgaagattttgcaacttattactgtcagswmgcanhcagtttccctccttwcacttttggcggagggaccaag

SEQ ID NO: 2803 - DNA, 75 bp, Artificial Sequence
  Description of Artificial Sequence: Synthetic oligonucleotide
  modified_base (40)..(40): a, c, t or g
cctgaagattttgcaacttattactgtcagswmgcaaatnhcttccctccttwcacttttggcggagggaccaag

SEQ ID NO: 2804 - DNA, 75 bp, Artificial Sequence
  Description of Artificial Sequence: Synthetic oligonucleotide
cctgaagattttgcaacttattactgtcagswmgcaaatagtywccctccttwcacttttggcggagggaccaag

SEQ ID NO: 2805 - DNA, 75 bp, Artificial Sequence
  Description of Artificial Sequence: Synthetic oligonucleotide
cctgaagattttgcaacttattactgtswmswmgcaaatagtttccctcctmtcacttttggcggagggaccaag

SEQ ID NO: 2806 - DNA, 75 bp, Artificial Sequence
  Description of Artificial Sequence: Synthetic oligonucleotide
  modified_base (35)..(35): a, c, t or g
  modified_base (37)..(37): a, c, t or g
cctgaagattttgcaacttattactgtcagcagrnanhcagtttccctcctmtcacttttggcggagggaccaag

SEQ ID NO: 2807 - DNA, 75 bp, Artificial Sequence
  Description of Artificial Sequence: Synthetic oligonucleotide
  modified_base (35)..(35): a, c, t or g
  modified_base (40)..(40): a, c, t or g
cctgaagattttgcaacttattactgtcagcagrnaaatnhcttccctcctmtcacttttggcggagggaccaag

SEQ ID NO: 2808 - DNA, 75 bp, Artificial Sequence
  Description of Artificial Sequence: Synthetic oligonucleotide
  modified_base (35)..(35): a, c, t or g
cctgaagattttgcaacttattactgtcagcagrnaaatagtywccctcctmtcacttttggcggagggaccaag

SEQ ID NO: 2809 - DNA, 75 bp, Artificial Sequence
  Description of Artificial Sequence: Synthetic oligonucleotide
  modified_base (37)..(37): a, c, t or g
  modified_base (40)..(40): a, c, t or g
cctgaagattttgcaacttattactgtcagcaggcanhcnhcttccctcctmtcacttttggcggagggaccaag

SEQ ID NO: 2810 - DNA, 75 bp, Artificial Sequence
  Description of Artificial Sequence: Synthetic oligonucleotide
  modified_base (37)..(37): a, c, t or g
cctgaagattttgcaacttattactgtcagcaggcanhcagtywccctcctmtcacttttggcggagggaccaag

SEQ ID NO: 2811 - DNA, 75 bp, Artificial Sequence
  Description of Artificial Sequence: Synthetic oligonucleotide
  modified_base (40)..(40): a, c, t or g
cctgaagattttgcaacttattactgtcagcaggcaaatnhcywccctcctmtcacttttggcggagggaccaag

SEQ ID NO: 2812 - DNA, 75 bp, Artificial Sequence
  Description of Artificial Sequence: Synthetic oligonucleotide
  modified_base (35)..(35): a, c, t or g
cctgaagattttgcaacttattactgtswmcagrnaaatagtttccctcctmtcacttttggcggagggaccaag

SEQ ID NO: 2813 - DNA, 75 bp, Artificial Sequence
  Description of Artificial Sequence: Synthetic oligonucleotide
  modified_base (37)..(37): a, c, t or g
cctgaagattttgcaacttattactgtswmcaggcanhcagtttccctcctmtcacttttggcggagggaccaag

SEQ ID NO: 2814 - DNA, 75 bp, Artificial Sequence
  Description of Artificial Sequence: Synthetic oligonucleotide
  modified_base (40)..(40): a, c, t or g
cctgaagattttgcaacttattactgtswmcaggcaaatnhcttccctcctmtcacttttggcggagggaccaag

SEQ ID NO: 2815 - DNA, 75 bp, Artificial Sequence
  Description of Artificial Sequence: Synthetic oligonucleotide
cctgaagattttgcaacttattactgtswmcaggcaaatagtywccctcctmtcacttttggcggagggaccaag

SEQ ID NO: 2816 - DNA, 75 bp, Artificial Sequence
  Description of Artificial Sequence: Synthetic oligonucleotide
  modified_base (35)..(35): a, c, t or g
cctgaagattttgcaacttattactgtcagswmrnaaatagtttccctcctmtcacttttggcggagggaccaag

SEQ ID NO: 2817 - DNA, 75 bp, Artificial Sequence
  Description of Artificial Sequence: Synthetic oligonucleotide
  modified_base (37)..(37): a, c, t or g
cctgaagattttgcaacttattactgtcagswmgcanhcagtttccctcctmtcacttttggcggagggaccaag

SEQ ID NO: 2818 - DNA, 75 bp, Artificial Sequence
  Description of Artificial Sequence: Synthetic oligonucleotide
  modified_base (40)..(40): a, c, t or g
cctgaagattttgcaacttattactgtcagswmgcaaatnhcttccctcctmtcacttttggcggagggaccaag

SEQ ID NO: 2819 - DNA, 75 bp, Artificial Sequence
  Description of Artificial Sequence: Synthetic oligonucleotide
cctgaagattttgcaacttattactgtcagswmgcaaatagtywccctcctmtcacttttggcggagggaccaag

SEQ ID NO: 2820 - DNA, 75 bp, Artificial Sequence
  Description of Artificial Sequence: Synthetic oligonucleotide
cctgaagattttgcaacttattactgtswmswmgcaaatagtttccctcctwggacttttggcggagggaccaag

SEQ ID NO: 2821 - DNA, 75 bp, Artificial Sequence
  Description of Artificial Sequence: Synthetic oligonucleotide
  modified_base (35)..(35): a, c, t or g
  modified_base (37)..(37): a, c, t or g
cctgaagattttgcaacttattactgtcagcagrnanhcagtttccctcctwggacttttggcggagggaccaag

SEQ ID NO: 2822 - DNA, 75 bp, Artificial Sequence
  Description of Artificial Sequence: Synthetic oligonucleotide
  modified_base (35)..(35): a, c, t or g
  modified_base (40)..(40): a, c, t or g
cctgaagattttgcaacttattactgtcagcagrnaaatnhcttccctcctwggacttttggcggagggaccaag

SEQ ID NO: 2823 - DNA, 75 bp, Artificial Sequence
  Description of Artificial Sequence: Synthetic oligonucleotide
  modified_base (35)..(35): a, c, t or g
cctgaagattttgcaacttattactgtcagcagrnaaatagtywccctcctwggacttttggcggagggaccaag

SEQ ID NO: 2824 - DNA, 75 bp, Artificial Sequence
  Description of Artificial Sequence: Synthetic oligonucleotide
  modified_base (37)..(37): a, c, t or g
  modified_base (40)..(40): a, c, t or g
cctgaagattttgcaacttattactgtcagcaggcanhcnhcttccctcctwggacttttggcggagggaccaag

SEQ ID NO: 2825 - DNA, 75 bp, Artificial Sequence
  Description of Artificial Sequence: Synthetic oligonucleotide
  modified_base (37)..(37): a, c, t or g
cctgaagattttgcaacttattactgtcagcaggcanhcagtywccctcctwggacttttggcggagggaccaag

SEQ ID NO: 2826 - DNA, 75 bp, Artificial Sequence
  Description of Artificial Sequence: Synthetic oligonucleotide
  modified_base (40)..(40): a, c, t or g
cctgaagattttgcaacttattactgtcagcaggcaaatnhcywccctcctwggacttttggcggagggaccaag

SEQ ID NO: 2827 - DNA, 75 bp, Artificial Sequence
  Description of Artificial Sequence: Synthetic oligonucleotide
  modified_base (35)..(35): a, c, t or g
cctgaagattttgcaacttattactgtswmcagrnaaatagtttccctcctwggacttttggcggagggaccaag

SEQ ID NO: 2828 - DNA, 75 bp, Artificial Sequence
  Description of Artificial Sequence: Synthetic oligonucleotide
  modified_base (37)..(37): a, c, t or g
cctgaagattttgcaacttattactgtswmcaggcanhcagtttccctcctwggacttttggcggagggaccaag

SEQ ID NO: 2829 - DNA, 75 bp, Artificial Sequence
  Description of Artificial Sequence: Synthetic oligonucleotide
  modified_base (40)..(40): a, c, t or g
cctgaagattttgcaacttattactgtswmcaggcaaatnhcttccctcctwggacttttggcggagggaccaag

SEQ ID NO: 2830 - DNA, 75 bp, Artificial Sequence
  Description of Artificial Sequence: Synthetic oligonucleotide
cctgaagattttgcaacttattactgtswmcaggcaaatagtywccctcctwggacttttggcggagggaccaag

SEQ ID NO: 2831 - DNA, 75 bp, Artificial Sequence
  Description of Artificial Sequence: Synthetic oligonucleotide
  modified_base (35)..(35): a, c, t or g
cctgaagattttgcaacttattactgtcagswmrnaaatagtttccctcctwggacttttggcggagggaccaag

SEQ ID NO: 2832 - DNA, 75 bp, Artificial Sequence
  Description of Artificial Sequence: Synthetic oligonucleotide
  modified_base (37)..(37): a, c, t or g
cctgaagattttgcaacttattactgtcagswmgcanhcagtttccctcctwggacttttggcggagggaccaag

SEQ ID NO: 2833 - DNA, 75 bp, Artificial Sequence
  Description of Artificial Sequence: Synthetic oligonucleotide
  modified_base (40)..(40): a, c, t or g
cctgaagattttgcaacttattactgtcagswmgcaaatnhcttccctcctwggacttttggcggagggaccaag

SEQ ID NO: 2834 - DNA, 75 bp, Artificial Sequence
  Description of Artificial Sequence: Synthetic oligonucleotide
cctgaagattttgcaacttattactgtcagswmgcaaatagtywccctcctwggacttttggcggagggaccaag

SEQ ID NO: 2835 - DNA, 75 bp, Artificial Sequence
  Description of Artificial Sequence: Synthetic oligonucleotide
cctgaagatattgcaacatattactgtswmswmtacgataatctccctccttwcacttttggcggagggaccaag

SEQ ID NO: 2836 - DNA, 75 bp, Artificial Sequence
  Description of Artificial Sequence: Synthetic oligonucleotide
  modified_base (37)..(37): a, c, t or g
cctgaagatattgcaacatattactgtcagcagbhcnhcaatctccctccttwcacttttggcggagggaccaag

SEQ ID NO: 2837 - DNA, 75 bp, Artificial Sequence
  Description of Artificial Sequence: Synthetic oligonucleotide
  modified_base (40)..(40): a, c, t or g
cctgaagatattgcaacatattactgtcagcagbhcgatnhcctccctccttwcacttttggcggagggaccaag

SEQ ID NO: 2838 - DNA, 75 bp, Artificial Sequence
  Description of Artificial Sequence: Synthetic oligonucleotide
cctgaagatattgcaacatattactgtcagcagbhcgataatywccctccttwcacttttggcggagggaccaag

SEQ ID NO: 2839 - DNA, 75 bp, Artificial Sequence
  Description of Artificial Sequence: Synthetic oligonucleotide
  modified_base (37)..(37): a, c, t or g
  modified_base (40)..(40): a, c, t or g
cctgaagatattgcaacatattactgtcagcagtacnhcnhcctccctccttwcacttttggcggagggaccaag

SEQ ID NO: 2840 - DNA, 75 bp, Artificial Sequence
  Description of Artificial Sequence: Synthetic oligonucleotide
  modified_base (37)..(37): a, c, t or g
cctgaagatattgcaacatattactgtcagcagtacnhcaatywccctccttwcacttttggcggagggaccaag

SEQ ID NO: 2841 - DNA, 75 bp, Artificial Sequence
  Description of Artificial Sequence: Synthetic oligonucleotide
  modified_base (40)..(40): a, c, t or g
cctgaagatattgcaacatattactgtcagcagtacgatnhcywccctccttwcacttttggcggagggaccaag

SEQ ID NO: 2842 - DNA, 75 bp, Artificial Sequence
  Description of Artificial Sequence: Synthetic oligonucleotide
cctgaagatattgcaacatattactgtswmcagbhcgataatctccctccttwcacttttggcggagggaccaag

SEQ ID NO: 2843 - DNA, 75 bp, Artificial Sequence
  Description of Artificial Sequence: Synthetic oligonucleotide
  modified_base (37)..(37): a, c, t or g
cctgaagatattgcaacatattactgtswmcagtacnhcaatctccctccttwcacttttggcggagggaccaag

SEQ ID NO: 2844 - DNA, 75 bp, Artificial Sequence
  Description of Artificial Sequence: Synthetic oligonucleotide
  modified_base (40)..(40): a, c, t or g
cctgaagatattgcaacatattactgtswmcagtacgatnhcctccctccttwcacttttggcggagggaccaag

SEQ ID NO: 2845 - DNA, 75 bp, Artificial Sequence
  Description of Artificial Sequence: Synthetic oligonucleotide
cctgaagatattgcaacatattactgtswmcagtacgataatywccctccttwcacttttggcggagggaccaag

SEQ ID NO: 2846 - DNA, 75 bp, Artificial Sequence
  Description of Artificial Sequence: Synthetic oligonucleotide
cctgaagatattgcaacatattactgtcagswmbhcgataatctccctccttwcacttttggcggagggaccaag

SEQ ID NO: 2847 - DNA, 75 bp, Artificial Sequence
  Description of Artificial Sequence: Synthetic oligonucleotide
  modified_base (37)..(37): a, c, t or g
cctgaagatattgcaacatattactgtcagswmtacnhcaatctccctccttwcacttttggcggagggaccaag

SEQ ID NO: 2848 - DNA, 75 bp, Artificial Sequence
  Description of Artificial Sequence: Synthetic oligonucleotide
  modified_base (40)..(40): a, c, t or g
cctgaagatattgcaacatattactgtcagswmtacgatnhcctccctccttwcacttttggcggagggaccaag

SEQ ID NO: 2849 - DNA, 75 bp, Artificial Sequence
  Description of Artificial Sequence: Synthetic oligonucleotide
cctgaagatattgcaacatattactgtcagswmtacgataatywccctccttwcacttttggcggagggaccaag

SEQ ID NO: 2850 - DNA, 75 bp, Artificial Sequence
  Description of Artificial Sequence: Synthetic oligonucleotide
cctgaagatattgcaacatattactgtswmswmtacgataatctccctcctmtcacttttggcggagggaccaag

SEQ ID NO: 2851 - DNA, 75 bp, Artificial Sequence
  Description of Artificial Sequence: Synthetic oligonucleotide
  modified_base (37)..(37): a, c, t or g
cctgaagatattgcaacatattactgtcagcagbhcnhcaatctccctcctmtcacttttggcggagggaccaag

SEQ ID NO: 2852 - DNA, 75 bp, Artificial Sequence
  Description of Artificial Sequence: Synthetic oligonucleotide
  modified_base (40)..(40): a, c, t or g
cctgaagatattgcaacatattactgtcagcagbhcgatnhcctccctcctmtcacttttggcggagggaccaag

SEQ ID NO: 2853 - DNA, 75 bp, Artificial Sequence
  Description of Artificial Sequence: Synthetic oligonucleotide
cctgaagatattgcaacatattactgtcagcagbhcgataatywccctcctmtcacttttggcggagggaccaag

SEQ ID NO: 2854 - DNA, 75 bp, Artificial Sequence
  Description of Artificial Sequence: Synthetic oligonucleotide
  modified_base (37)..(37): a, c, t or g
  modified_base (40)..(40): a, c, t or g
cctgaagatattgcaacatattactgtcagcagtacnhcnhcctccctcctmtcacttttggcggagggaccaag

SEQ ID NO: 2855 - DNA, 75 bp, Artificial Sequence
  Description of Artificial Sequence: Synthetic oligonucleotide
  modified_base (37)..(37): a, c, t or g
cctgaagatattgcaacatattactgtcagcagtacnhcaatywccctcctmtcacttttggcggagggaccaag

SEQ ID NO: 2856 - DNA, 75 bp, Artificial Sequence
  Description of Artificial Sequence: Synthetic oligonucleotide
  modified_base (40)..(40): a, c, t or g
cctgaagatattgcaacatattactgtcagcagtacgatnhcywccctcctmtcacttttggcggagggaccaag

SEQ ID NO: 2857 - DNA, 75 bp, Artificial Sequence
  Description of Artificial Sequence: Synthetic oligonucleotide
cctgaagatattgcaacatattactgtswmcagbhcgataatctccctcctmtcacttttggcggagggaccaag

SEQ ID NO: 2858 - DNA, 75 bp, Artificial Sequence
  Description of Artificial Sequence: Synthetic oligonucleotide
  modified_base (37)..(37): a, c, t or g
cctgaagatattgcaacatattactgtswmcagtacnhcaatctccctcctmtcacttttggcggagggaccaag

SEQ ID NO: 2859 - DNA, 75 bp, Artificial Sequence
  Description of Artificial Sequence: Synthetic oligonucleotide
  modified_base (40)..(40): a, c, t or g
cctgaagatattgcaacatattactgtswmcagtacgatnhcctccctcctmtcacttttggcggagggaccaag

SEQ ID NO: 2860 - DNA, 75 bp, Artificial Sequence
  Description of Artificial Sequence: Synthetic oligonucleotide
cctgaagatattgcaacatattactgtswmcagtacgataatywccctcctmtcacttttggcggagggaccaag

SEQ ID NO: 2861 - DNA, 75 bp, Artificial Sequence
  Description of Artificial Sequence: Synthetic oligonucleotide
cctgaagatattgcaacatattactgtcagswmbhcgataatctccctcctmtcacttttggcggagggaccaag

SEQ ID NO: 2862 - DNA, 75 bp, Artificial Sequence
  Description of Artificial Sequence: Synthetic oligonucleotide
  modified_base (37)..(37): a, c, t or g
cctgaagatattgcaacatattactgtcagswmtacnhcaatctccctcctmtcacttttggcggagggaccaag

SEQ ID NO: 2863 - DNA, 75 bp, Artificial Sequence
  Description of Artificial Sequence: Synthetic oligonucleotide
  modified_base (40)..(40): a, c, t or g
cctgaagatattgcaacatattactgtcagswmtacgatnhcctccctcctmtcacttttggcggagggaccaag

SEQ ID NO: 2864 - DNA, 75 bp, Artificial Sequence
  Description of Artificial Sequence: Synthetic oligonucleotide
cctgaagatattgcaacatattactgtcagswmtacgataatywccctcctmtcacttttggcggagggaccaag

SEQ ID NO: 2865 - DNA, 75 bp, Artificial Sequence
  Description of Artificial Sequence: Synthetic oligonucleotide
cctgaagatattgcaacatattactgtswmswmtacgataatctccctcctwggacttttggcggagggaccaag

SEQ ID NO: 2866 - DNA, 75 bp, Artificial Sequence
  Description of Artificial Sequence: Synthetic oligonucleotide
  modified_base (37)..(37): a, c, t or g
cctgaagatattgcaacatattactgtcagcagbhcnhcaatctccctcctwggacttttggcggagggaccaag

SEQ ID NO: 2867 - DNA, 75 bp, Artificial Sequence
  Description of Artificial Sequence: Synthetic oligonucleotide
  modified_base (40)..(40): a, c, t or g
cctgaagatattgcaacatattactgtcagcagbhcgatnhcctccctcctwggacttttggcggagggaccaag

SEQ ID NO: 2868 - DNA, 75 bp, Artificial Sequence
  Description of Artificial Sequence: Synthetic oligonucleotide
cctgaagatattgcaacatattactgtcagcagbhcgataatywccctcctwggacttttggcggagggaccaag

SEQ ID NO: 2869 - DNA, 75 bp, Artificial Sequence
  Description of Artificial Sequence: Synthetic oligonucleotide
  modified_base (37)..(37): a, c, t or g
  modified_base (40)..(40): a, c, t or g
cctgaagatattgcaacatattactgtcagcagtacnhcnhcctccctcctwggacttttggcggagggaccaag

SEQ ID NO: 2870 - DNA, 75 bp, Artificial Sequence
  Description of Artificial Sequence: Synthetic oligonucleotide
  modified_base (37)..(37): a, c, t or g
cctgaagatattgcaacatattactgtcagcagtacnhcaatywccctcctwggacttttggcggagggaccaag

SEQ ID NO: 2871 - DNA, 75 bp, Artificial Sequence
  Description of Artificial Sequence: Synthetic oligonucleotide
  modified_base (40)..(40): a, c, t or g
cctgaagatattgcaacatattactgtcagcagtacgatnhcywccctcctwggacttttggcggagggaccaag

SEQ ID NO: 2872 - DNA, 75 bp, Artificial Sequence
  Description of Artificial Sequence: Synthetic oligonucleotide
cctgaagatattgcaacatattactgtswmcagbhcgataatctccctcctwggacttttggcggagggaccaag

SEQ ID NO: 2873 - DNA, 75 bp, Artificial Sequence
  Description of Artificial Sequence: Synthetic oligonucleotide
  modified_base (37)..(37): a, c, t or g
cctgaagatattgcaacatattactgtswmcagtacnhcaatctccctcctwggacttttggcggagggaccaag

SEQ ID NO: 2874 - DNA, 75 bp, Artificial Sequence
  Description of Artificial Sequence: Synthetic oligonucleotide
  modified_base (40)..(40): a, c, t or g
cctgaagatattgcaacatattactgtswmcagtacgatnhcctccctcctwggacttttggcggagggaccaag

SEQ ID NO: 2875 - DNA, 75 bp, Artificial Sequence
  Description of Artificial Sequence: Synthetic oligonucleotide
cctgaagatattgcaacatattactgtswmcagtacgataatywccctcctwggacttttggcggagggaccaag

SEQ ID NO: 2876 - DNA, 75 bp, Artificial Sequence
  Description of Artificial Sequence: Synthetic oligonucleotide
cctgaagatattgcaacatattactgtcagswmbhcgataatctccctcctwggacttttggcggagggaccaag

SEQ ID NO: 2877 - DNA, 75 bp, Artificial Sequence
  Description of Artificial Sequence: Synthetic oligonucleotide
  modified_base (37)..(37): a, c, t or g
cctgaagatattgcaacatattactgtcagswmtacnhcaatctccctcctwggacttttggcggagggaccaag

SEQ ID NO: 2878 - DNA, 75 bp, Artificial Sequence
  Description of Artificial Sequence: Synthetic oligonucleotide
  modified_base (40)..(40): a, c, t or g
cctgaagatattgcaacatattactgtcagswmtacgatnhcctccctcctwggacttttggcggagggaccaag

SEQ ID NO: 2879 - DNA, 75 bp, Artificial Sequence
  Description of Artificial Sequence: Synthetic oligonucleotide
cctgaagatattgcaacatattactgtcagswmtacgataatywccctcctwggacttttggcggagggaccaag

SEQ ID NO: 2880 - DNA, 75 bp, Artificial Sequence
  Description of Artificial Sequence: Synthetic oligonucleotide
cctgaagattttgcaacttactactgtswmswmagctacagtactcctccttwcacttttggcggagggaccaag

SEQ ID NO: 2881 - DNA, 75 bp, Artificial Sequence
  Description of Artificial Sequence: Synthetic oligonucleotide
  modified_base (35)..(35): a, c, t or g
cctgaagattttgcaacttactactgtcagcaavnabhcagtactcctccttwcacttttggcggagggaccaag

SEQ ID NO: 2882 - DNA, 75 bp, Artificial Sequence
  Description of Artificial Sequence: Synthetic oligonucleotide
  modified_base (35)..(35): a, c, t or g
  modified_base (40)..(40): a, c, t or g
cctgaagattttgcaacttactactgtcagcaavnatacnhcactcctccttwcacttttggcggagggaccaag

SEQ ID NO: 2883 - DNA, 75 bp, Artificial Sequence
  Description of Artificial Sequence: Synthetic oligonucleotide
  modified_base (35)..(35): a, c, t or g
cctgaagattttgcaacttactactgtcagcaavnatacagtbhccctccttwcacttttggcggagggaccaag

SEQ ID NO: 2884 - DNA, 75 bp, Artificial Sequence
  Description of Artificial Sequence: Synthetic oligonucleotide
  modified_base (40)..(40): a, c, t or g
cctgaagattttgcaacttactactgtcagcaaagcbhcnhcactcctccttwcacttttggcggagggaccaag

SEQ ID NO: 2885 - DNA, 75 bp, Artificial Sequence
  Description of Artificial Sequence: Synthetic oligonucleotide
cctgaagattttgcaacttactactgtcagcaaagcbhcagtbhccctccttwcacttttggcggagggaccaag

SEQ ID NO: 2886 - DNA, 75 bp, Artificial Sequence
  Description of Artificial Sequence: Synthetic oligonucleotide
  modified_base (40)..(40): a, c, t or g
cctgaagattttgcaacttactactgtcagcaaagctacnhcbhccctccttwcacttttggcggagggaccaag

SEQ ID NO: 2887 - DNA, 75 bp, Artificial Sequence
  Description of Artificial Sequence: Synthetic oligonucleotide
  modified_base (35)..(35): a, c, t or g
cctgaagattttgcaacttactactgtswmcaavnatacagtactcctccttwcacttttggcggagggaccaag

SEQ ID NO: 2888 - DNA, 75 bp, Artificial Sequence
  Description of Artificial Sequence: Synthetic oligonucleotide
cctgaagattttgcaacttactactgtswmcaaagcbhcagtactcctccttwcacttttggcggagggaccaag

SEQ ID NO: 2889 - DNA, 75 bp, Artificial Sequence
  Description of Artificial Sequence: Synthetic oligonucleotide
  modified_base (40)..(40): a, c, t or g
cctgaagattttgcaacttactactgtswmcaaagctacnhcactcctccttwcacttttggcggagggaccaag

SEQ ID NO: 2890 - DNA, 75 bp, Artificial Sequence
  Description of Artificial Sequence: Synthetic oligonucleotide
cctgaagattttgcaacttactactgtswmcaaagctacagtbhccctccttwcacttttggcggagggaccaag

SEQ ID NO: 2891 - DNA, 75 bp, Artificial Sequence
  Description of Artificial Sequence: Synthetic oligonucleotide
  modified_base (35)..(35): a, c, t or g
cctgaagattttgcaacttactactgtcagswmvnatacagtactcctccttwcacttttggcggagggaccaag

SEQ ID NO: 2892 - DNA, 75 bp, Artificial Sequence
  Description of Artificial Sequence: Synthetic oligonucleotide
cctgaagattttgcaacttactactgtcagswmagcbhcagtactcctccttwcacttttggcggagggaccaag

SEQ ID NO: 2893 - DNA, 75 bp, Artificial Sequence
  Description of Artificial Sequence: Synthetic oligonucleotide
  modified_base (40)..(40): a, c, t or g
cctgaagattttgcaacttactactgtcagswmagctacnhcactcctccttwcacttttggcggagggaccaag

SEQ ID NO: 2894 - DNA, 75 bp, Artificial Sequence
  Description of Artificial Sequence: Synthetic oligonucleotide
cctgaagattttgcaacttactactgtcagswmagctacagtbhccctccttwcacttttggcggagggaccaag

SEQ ID NO: 2895 - DNA, 75 bp, Artificial Sequence
  Description of Artificial Sequence: Synthetic oligonucleotide
cctgaagattttgcaacttactactgtswmswmagctacagtactcctcctmtcacttttggcggagggaccaag

SEQ ID NO: 2896 - DNA, 75 bp, Artificial Sequence
  Description of Artificial Sequence: Synthetic oligonucleotide
  modified_base (35)..(35): a, c, t or g
cctgaagattttgcaacttactactgtcagcaavnabhcagtactcctcctmtcacttttggcggagggaccaag

SEQ ID NO: 2897 - DNA, 75 bp, Artificial Sequence
  Description of Artificial Sequence: Synthetic oligonucleotide
  modified_base (35)..(35): a, c, t or g
  modified_base (40)..(40): a, c, t or g
cctgaagattttgcaacttactactgtcagcaavnatacnhcactcctcctmtcacttttggcggagggaccaag

SEQ ID NO: 2898 - DNA, 75 bp, Artificial Sequence
  Description of Artificial Sequence: Synthetic oligonucleotide
  modified_base (35)..(35): a, c, t or g
cctgaagattttgcaacttactactgtcagcaavnatacagtbhccctcctmtcacttttggcggagggaccaag

SEQ ID NO: 2899 - DNA, 75 bp, Artificial Sequence
  Description of Artificial Sequence: Synthetic oligonucleotide
  modified_base (40)..(40): a, c, t or g
cctgaagattttgcaacttactactgtcagcaaagcbhcnhcactcctcctmtcacttttggcggagggaccaag

SEQ ID NO: 2900 - DNA, 75 bp, Artificial Sequence
  Description of Artificial Sequence: Synthetic oligonucleotide
cctgaagattttgcaacttactactgtcagcaaagcbhcagtbhccctcctmtcacttttggcggagggaccaag

SEQ ID NO: 2901 - DNA, 75 bp, Artificial Sequence
  Description of Artificial Sequence: Synthetic oligonucleotide
  modified_base (40)..(40): a, c, t or g
cctgaagattttgcaacttactactgtcagcaaagctacnhcbhccctcctmtcacttttggcggagggaccaag

SEQ ID NO: 2902 - DNA, 75 bp, Artificial Sequence
  Description of Artificial Sequence: Synthetic oligonucleotide
  modified_base (35)..(35): a, c, t or g
cctgaagattttgcaacttactactgtswmcaavnatacagtactcctcctmtcacttttggcggagggaccaag

SEQ ID NO: 2903 - DNA, 75 bp, Artificial Sequence
  Description of Artificial Sequence: Synthetic oligonucleotide
cctgaagattttgcaacttactactgtswmcaaagcbhcagtactcctcctmtcacttttggcggagggaccaag

SEQ ID NO: 2904 - DNA, 75 bp, Artificial Sequence
  Description of Artificial Sequence: Synthetic oligonucleotide
  modified_base (40)..(40): a, c, t or g
cctgaagattttgcaacttactactgtswmcaaagctacnhcactcctcctmtcacttttggcggagggaccaag

SEQ ID NO: 2905 - DNA, 75 bp, Artificial Sequence
  Description of Artificial Sequence: Synthetic oligonucleotide
cctgaagattttgcaacttactactgtswmcaaagctacagtbhccctcctmtcacttttggcggagggaccaag

SEQ ID NO: 2906 - DNA, 75 bp, Artificial Sequence
  Description of Artificial Sequence: Synthetic oligonucleotide
  modified_base (35)..(35): a, c, t or g
cctgaagattttgcaacttactactgtcagswmvnatacagtactcctcctmtcacttttggcggagggaccaag

SEQ ID NO: 2907 - DNA, 75 bp, Artificial Sequence
  Description of Artificial Sequence: Synthetic oligonucleotide
cctgaagattttgcaacttactactgtcagswmagcbhcagtactcctcctmtcacttttggcggagggaccaag

SEQ ID NO: 2908 - DNA, 75 bp, Artificial Sequence
  Description of Artificial Sequence: Synthetic oligonucleotide
  modified_base (40)..(40): a, c, t or g
cctgaagattttgcaacttactactgtcagswmagctacnhcactcctcctmtcacttttggcggagggaccaag

SEQ ID NO: 2909 - DNA, 75 bp, Artificial Sequence
  Description of Artificial Sequence: Synthetic oligonucleotide
cctgaagattttgcaacttactactgtcagswmagctacagtbhccctcctmtcacttttggcggagggaccaag

SEQ ID NO: 2910 - DNA, 75 bp, Artificial Sequence
  Description of Artificial Sequence: Synthetic oligonucleotide
cctgaagattttgcaacttactactgtswmswmagctacagtactcctcctwggacttttggcggagggaccaag

SEQ ID NO: 2911 - DNA, 75 bp, Artificial Sequence
  Description of Artificial Sequence: Synthetic oligonucleotide
  modified_base (35)..(35): a, c, t or g
cctgaagattttgcaacttactactgtcagcaavnabhcagtactcctcctwggacttttggcggagggaccaag

SEQ ID NO: 2912 - DNA, 75 bp, Artificial Sequence
  Description of Artificial Sequence: Synthetic oligonucleotide
  modified_base (35)..(35): a, c, t or g
  modified_base (40)..(40): a, c, t or g
cctgaagattttgcaacttactactgtcagcaavnatacnhcactcctcctwggacttttggcggagggaccaag

SEQ ID NO: 2913 - DNA, 75 bp, Artificial Sequence
  Description of Artificial Sequence: Synthetic oligonucleotide
  modified_base (35)..(35): a, c, t or g
cctgaagattttgcaacttactactgtcagcaavnatacagtbhccctcctwggacttttggcggagggaccaag

SEQ ID NO: 2914 - DNA, 75 bp, Artificial Sequence
  Description of Artificial Sequence: Synthetic oligonucleotide
  modified_base (40)..(40): a, c, t or g
cctgaagattttgcaacttactactgtcagcaaagcbhcnhcactcctcctwggacttttggcggagggaccaag

SEQ ID NO: 2915 - DNA, 75 bp, Artificial Sequence
  Description of Artificial Sequence: Synthetic oligonucleotide
cctgaagattttgcaacttactactgtcagcaaagcbhcagtbhccctcctwggacttttggcggagggaccaag

SEQ ID NO: 2916 - DNA, 75 bp, Artificial Sequence
  Description of Artificial Sequence: Synthetic oligonucleotide
  modified_base (40)..(40): a, c, t or g
cctgaagattttgcaacttactactgtcagcaaagctacnhcbhccctcctwggacttttggcggagggaccaag

SEQ ID NO: 2917 - DNA, 75 bp, Artificial Sequence
  Description of Artificial Sequence: Synthetic oligonucleotide
  modified_base (35)..(35): a, c, t or g
cctgaagattttgcaacttactactgtswmcaavnatacagtactcctcctwggacttttggcggagggaccaag

SEQ ID NO: 2918 - DNA, 75 bp, Artificial Sequence
  Description of Artificial Sequence: Synthetic oligonucleotide
cctgaagattttgcaacttactactgtswmcaaagcbhcagtactcctcctwggacttttggcggagggaccaag

SEQ ID NO: 2919 - DNA, 75 bp, Artificial Sequence
  Description of Artificial Sequence: Synthetic oligonucleotide
  modified_base (40)..(40): a, c, t or g
cctgaagattttgcaacttactactgtswmcaaagctacnhcactcctcctwggacttttggcggagggaccaag

SEQ ID NO: 2920 - DNA, 75 bp, Artificial Sequence
  Description of Artificial Sequence: Synthetic oligonucleotide
cctgaagattttgcaacttactactgtswmcaaagctacagtbhccctcctwggacttttggcggagggaccaag

SEQ ID NO: 2921 - DNA, 75 bp, Artificial Sequence
  Description of Artificial Sequence: Synthetic oligonucleotide
  modified_base (35)..(35): a, c, t or g
cctgaagattttgcaacttactactgtcagswmvnatacagtactcctcctwggacttttggcggagggaccaag

SEQ ID NO: 2922 - DNA, 75 bp, Artificial Sequence
  Description of Artificial Sequence: Synthetic oligonucleotide
cctgaagattttgcaacttactactgtcagswmagcbhcagtactcctcctwggacttttggcggagggaccaag

SEQ ID NO: 2923 - DNA, 75 bp, Artificial Sequence
  Description of Artificial Sequence: Synthetic oligonucleotide
  modified_base (40)..(40): a, c, t or g
cctgaagattttgcaacttactactgtcagswmagctacnhcactcctcctwggacttttggcggagggaccaag

SEQ ID NO: 2924 - DNA, 75 bp, Artificial Sequence
  Description of Artificial Sequence: Synthetic oligonucleotide
cctgaagattttgcaacttactactgtcagswmagctacagtbhccctcctwggacttttggcggagggaccaag

SEQ ID NO: 2925 - DNA, 75 bp, Artificial Sequence
  Description of Artificial Sequence: Synthetic oligonucleotide
gctgaggatgttggggtttattactgcdtsswmgcactccagactcctccttwcacttttggcggagggaccaag

SEQ ID NO: 2926 - DNA, 75 bp, Artificial Sequence
  Description of Artificial Sequence: Synthetic oligonucleotide
  modified_base (35)..(35): a, c, t or g
  modified_base (38)..(38): a, c, t or g
gctgaggatgttggggtttattactgcatgcagvnamnacagactcctccttwcacttttggcggagggaccaag

SEQ ID NO: 2927 - DNA, 75 bp, Artificial Sequence
  Description of Artificial Sequence: Synthetic oligonucleotide
  modified_base (35)..(35): a, c, t or g
gctgaggatgttggggtttattactgcatgcagvnactcsrmactcctccttwcacttttggcggagggaccaag

SEQ ID NO: 2928 - DNA, 75 bp, Artificial Sequence
  Description of Artificial Sequence: Synthetic oligonucleotide
  modified_base (35)..(35): a, c, t or g
gctgaggatgttggggtttattactgcatgcagvnactccagvbccctccttwcacttttggcggagggaccaag

SEQ ID NO: 2929 - DNA, 75 bp, Artificial Sequence
  Description of Artificial Sequence: Synthetic oligonucleotide
  modified_base (38)..(38): a, c, t or g
gctgaggatgttggggtttattactgcatgcaggcamnasrmactcctccttwcacttttggcggagggaccaag

SEQ ID NO: 2930 - DNA, 75 bp, Artificial Sequence
  Description of Artificial Sequence: Synthetic oligonucleotide
  modified_base (38)..(38): a, c, t or g
gctgaggatgttggggtttattactgcatgcaggcamnacagvbccctccttwcacttttggcggagggaccaag

SEQ ID NO: 2931 - DNA, 75 bp, Artificial Sequence
  Description of Artificial Sequence: Synthetic oligonucleotide
gctgaggatgttggggtttattactgcatgcaggcactcsrmvbccctccttwcacttttggcggagggaccaag

SEQ ID NO: 2932 - DNA, 75 bp, Artificial Sequence
  Description of Artificial Sequence: Synthetic oligonucleotide
  modified_base (35)..(35): a, c, t or g
gctgaggatgttggggtttattactgcdtscagvnactccagactcctccttwcacttttggcggagggaccaag

SEQ ID NO: 2933 - DNA, 75 bp, Artificial Sequence
  Description of Artificial Sequence: Synthetic oligonucleotide
  modified_base (38)..(38): a, c, t or g
gctgaggatgttggggtttattactgcdtscaggcamnacagactcctccttwcacttttggcggagggaccaag

SEQ ID NO: 2934 - DNA, 75 bp, Artificial Sequence
  Description of Artificial Sequence: Synthetic oligonucleotide
gctgaggatgttggggtttattactgcdtscaggcactcsrmactcctccttwcacttttggcggagggaccaag

SEQ ID NO: 2935 - DNA, 75 bp, Artificial Sequence
  Description of Artificial Sequence: Synthetic oligonucleotide
gctgaggatgttggggtttattactgcdtscaggcactccagvbccctccttwcacttttggcggagggaccaag

SEQ ID NO: 2936 - DNA, 75 bp, Artificial Sequence
  Description of Artificial Sequence: Synthetic oligonucleotide
  modified_base (35)..(35): a, c, t or g
gctgaggatgttggggtttattactgcatgswmvnactccagactcctccttwcacttttggcggagggaccaag

SEQ ID NO: 2937 - DNA, 75 bp, Artificial Sequence
  Description of Artificial Sequence: Synthetic oligonucleotide
  modified_base (38)..(38): a, c, t or g
gctgaggatgttggggtttattactgcatgswmgcamnacagactcctccttwcacttttggcggagggaccaag

SEQ ID NO: 2938 - DNA, 75 bp, Artificial Sequence
  Description of Artificial Sequence: Synthetic oligonucleotide
gctgaggatgttggggtttattactgcatgswmgcactcsrmactcctccttwcacttttggcggagggaccaag

SEQ ID NO: 2939 - DNA, 75 bp, Artificial Sequence
  Description of Artificial Sequence: Synthetic oligonucleotide
gctgaggatgttggggtttattactgcatgswmgcactccagvbccctccttwcacttttggcggagggaccaag

SEQ ID NO: 2940 - DNA, 75 bp, Artificial Sequence
  Description of Artificial Sequence: Synthetic oligonucleotide
gctgaggatgttggggtttattactgcdtsswmgcactccagactcctcctmtcacttttggcggagggaccaag

SEQ ID NO: 2941 - DNA, 75 bp, Artificial Sequence
  Description of Artificial Sequence: Synthetic oligonucleotide
  modified_base (35)..(35): a, c, t or g
  modified_base (38)..(38): a, c, t or g
gctgaggatgttggggtttattactgcatgcagvnamnacagactcctcctmtcacttttggcggagggaccaag

SEQ ID NO: 2942 - DNA, 75 bp, Artificial Sequence
  Description of Artificial Sequence: Synthetic oligonucleotide
  modified_base (35)..(35): a, c, t or g
gctgaggatgttggggtttattactgcatgcagvnactcsrmactcctcctmtcacttttggcggagggaccaag

SEQ ID NO: 2943 - DNA, 75 bp, Artificial Sequence
  Description of Artificial Sequence: Synthetic oligonucleotide
  modified_base (35)..(35): a, c, t or g
gctgaggatgttggggtttattactgcatgcagvnactccagvbccctcctmtcacttttggcggagggaccaag

SEQ ID NO: 2944 - DNA, 75 bp, Artificial Sequence
  Description of Artificial Sequence: Synthetic oligonucleotide
  modified_base (38)..(38): a, c, t or g
gctgaggatgttggggtttattactgcatgcaggcamnasrmactcctcctmtcacttttggcggagggaccaag

SEQ ID NO: 2945 - DNA, 75 bp, Artificial Sequence
  Description of Artificial Sequence: Synthetic oligonucleotide
  modified_base (38)..(38): a, c, t or g
gctgaggatgttggggtttattactgcatgcaggcamnacagvbccctcctmtcacttttggcggagggaccaag

SEQ ID NO: 2946 - DNA, 75 bp, Artificial Sequence
  Description of Artificial Sequence: Synthetic oligonucleotide
gctgaggatgttggggtttattactgcatgcaggcactcsrmvbccctcctmtcacttttggcggagggaccaag

SEQ ID NO: 2947 - DNA, 75 bp, Artificial Sequence
  Description of Artificial Sequence: Synthetic oligonucleotide
  modified_base (35)..(35): a, c, t or g
gctgaggatgttggggtttattactgcdtscagvnactccagactcctcctmtcacttttggcggagggaccaag

SEQ ID NO: 2948 - DNA, 75 bp, Artificial Sequence
  Description of Artificial Sequence: Synthetic oligonucleotide
  modified_base (38)..(38): a, c, t or g
gctgaggatgttggggtttattactgcdtscaggcamnacagactcctcctmtcacttttggcggagggaccaag

SEQ ID NO: 2949 - DNA, 75 bp, Artificial Sequence
  Description of Artificial Sequence: Synthetic oligonucleotide
gctgaggatgttggggtttattactgcdtscaggcactcsrmactcctcctmtcacttttggcggagggaccaag

SEQ ID NO: 2950 - DNA, 75 bp, Artificial Sequence
  Description of Artificial Sequence: Synthetic oligonucleotide
gctgaggatgttggggtttattactgcdtscaggcactccagvbccctcctmtcacttttggcggagggaccaag

SEQ ID NO: 2951 - DNA, 75 bp, Artificial Sequence
  Description of Artificial Sequence: Synthetic oligonucleotide
  modified_base (35)..(35): a, c, t or g
gctgaggatgttggggtttattactgcatgswmvnactccagactcctcctmtcacttttggcggagggaccaag

SEQ ID NO: 2952 - DNA, 75 bp, Artificial Sequence
  Description of Artificial Sequence: Synthetic oligonucleotide
  modified_base (38)..(38): a, c, t or g
gctgaggatgttggggtttattactgcatgswmgcamnacagactcctcctmtcacttttggcggagggaccaag

SEQ ID NO: 2953 - DNA, 75 bp, Artificial Sequence
  Description of Artificial Sequence: Synthetic oligonucleotide
gctgaggatgttggggtttattactgcatgswmgcactcsrmactcctcctmtcacttttggcggagggaccaag

SEQ ID NO: 2954 - DNA, 75 bp, Artificial Sequence
  Description of Artificial Sequence: Synthetic oligonucleotide
gctgaggatgttggggtttattactgcatgswmgcactccagvbccctcctmtcacttttggcggagggaccaag

SEQ ID NO: 2955 - DNA, 75 bp, Artificial Sequence
  Description of Artificial Sequence: Synthetic oligonucleotide
gctgaggatgttggggtttattactgcdtsswmgcactccagactcctcctwggacttttggcggagggaccaag

SEQ ID NO: 2956 - DNA, 75 bp, Artificial Sequence
  Description of Artificial Sequence: Synthetic oligonucleotide
  modified_base (35)..(35): a, c, t or g
  modified_base (38)..(38): a, c, t or g
gctgaggatgttggggtttattactgcatgcagvnamnacagactcctcctwggacttttggcggagggaccaag

SEQ ID NO: 2957 - DNA, 75 bp, Artificial Sequence
  Description of Artificial Sequence: Synthetic oligonucleotide
  modified_base (35)..(35): a, c, t or g
gctgaggatgttggggtttattactgcatgcagvnactcsrmactcctcctwggacttttggcggagggaccaag

SEQ ID NO: 2958 - DNA, 75 bp, Artificial Sequence
  Description of Artificial Sequence: Synthetic oligonucleotide
  modified_base (35)..(35): a, c, t or g
gctgaggatgttggggtttattactgcatgcagvnactccagvbccctcctwggacttttggcggagggaccaag

SEQ ID NO: 2959 - DNA, 75 bp, Artificial Sequence
  Description of Artificial Sequence: Synthetic oligonucleotide
  modified_base (38)..(38): a, c, t or g
gctgaggatgttggggtttattactgcatgcaggcamnasrmactcctcctwggacttttggcggagggaccaag

SEQ ID NO: 2960 - DNA, 75 bp, Artificial Sequence
  Description of Artificial Sequence: Synthetic oligonucleotide
  modified_base (38)..(38): a, c, t or g
gctgaggatgttggggtttattactgcatgcaggcamnacagvbccctcctwggacttttggcggagggaccaag

SEQ ID NO: 2961 - DNA, 75 bp, Artificial Sequence
  Description of Artificial Sequence: Synthetic oligonucleotide
gctgaggatgttggggtttattactgcatgcaggcactcsrmvbccctcctwggacttttggcggagggaccaag

SEQ ID NO: 2962 - DNA, 75 bp, Artificial Sequence
  Description of Artificial Sequence: Synthetic oligonucleotide
  modified_base (35)..(35): a, c, t or g
gctgaggatgttggggtttattactgcdtscagvnactccagactcctcctwggacttttggcggagggaccaag

SEQ ID NO: 2963 - DNA, 75 bp, Artificial Sequence
  Description of Artificial Sequence: Synthetic oligonucleotide
  modified_base (38)..(38): a, c, t or g
gctgaggatgttggggtttattactgcdtscaggcamnacagactcctcctwggacttttggcggagggaccaag

SEQ ID NO: 2964 - DNA, 75 bp, Artificial Sequence
  Description of Artificial Sequence: Synthetic oligonucleotide
gctgaggatgttggggtttattactgcdtscaggcactcsrmactcctcctwggacttttggcggagggaccaag

SEQ ID NO: 2965 - DNA, 75 bp, Artificial Sequence
  Description of Artificial Sequence: Synthetic oligonucleotide
gctgaggatgttggggtttattactgcdtscaggcactccagvbccctcctwggacttttggcggagggaccaag

SEQ ID NO: 2966 - DNA, 75 bp, Artificial Sequence
  Description of Artificial Sequence: Synthetic oligonucleotide
  modified_base (35)..(35): a, c, t or g
gctgaggatgttggggtttattactgcatgswmvnactccagactcctcctwggacttttggcggagggaccaag

SEQ ID NO: 2967 - DNA, 75 bp, Artificial Sequence
  Description of Artificial Sequence: Synthetic oligonucleotide
  modified_base (38)..(38): a, c, t or g
gctgaggatgttggggtttattactgcatgswmgcamnacagactcctcctwggacttttggcggagggaccaag

SEQ ID NO: 2968 - DNA, 75 bp, Artificial Sequence
  Description of Artificial Sequence: Synthetic oligonucleotide
gctgaggatgttggggtttattactgcatgswmgcactcsrmactcctcctwggacttttggcggagggaccaag

SEQ ID NO: 2969 - DNA, 75 bp, Artificial Sequence
  Description of Artificial Sequence: Synthetic oligonucleotide
gctgaggatgttggggtttattactgcatgswmgcactccagvbccctcctwggacttttggcggagggaccaag

SEQ ID NO: 2970 - DNA, 75 bp, Artificial Sequence
  Description of Artificial Sequence: Synthetic oligonucleotide
cctgaagattttgcagtttattactgtswmswmagaagtaattggcctccttwcacttttggcggagggaccaag

SEQ ID NO: 2971 - DNA, 75 bp, Artificial Sequence
  Description of Artificial Sequence: Synthetic oligonucleotide
  modified_base (37)..(37): a, c, t or g
cctgaagattttgcagtttattactgtcagcagbhcnhcaattggcctccttwcacttttggcggagggaccaag

SEQ ID NO: 2972 - DNA, 75 bp, Artificial Sequence
  Description of Artificial Sequence: Synthetic oligonucleotide
  modified_base (40)..(40): a, c, t or g
cctgaagattttgcagtttattactgtcagcagbhcagtnhctggcctccttwcacttttggcggagggaccaag

SEQ ID NO: 2973 - DNA, 75 bp, Artificial Sequence
  Description of Artificial Sequence: Synthetic oligonucleotide
cctgaagattttgcagtttattactgtcagcagbhcagtaatywccctccttwcacttttggcggagggaccaag

SEQ ID NO: 2974 - DNA, 75 bp, Artificial Sequence
  Description of Artificial Sequence: Synthetic oligonucleotide
  modified_base (37)..(37): a, c, t or g
  modified_base (40)..(40): a, c, t or g
cctgaagattttgcagtttattactgtcagcagaganhcnhctggcctccttwcacttttggcggagggaccaag

SEQ ID NO: 2975 - DNA, 75 bp, Artificial Sequence
  Description of Artificial Sequence: Synthetic oligonucleotide
  modified_base (37)..(37): a, c, t or g
cctgaagattttgcagtttattactgtcagcagaganhcaatywccctccttwcacttttggcggagggaccaag

SEQ ID NO: 2976 - DNA, 75 bp, Artificial Sequence
  Description of Artificial Sequence: Synthetic oligonucleotide
  modified_base (40)..(40): a, c, t or g
cctgaagattttgcagtttattactgtcagcagagaagtnhcywccctccttwcacttttggcggagggaccaag

SEQ ID NO: 2977 - DNA, 75 bp, Artificial Sequence
  Description of Artificial Sequence: Synthetic oligonucleotide
cctgaagattttgcagtttattactgtswmcagbhcagtaattggcctccttwcacttttggcggagggaccaag

SEQ ID NO: 2978 - DNA, 75 bp, Artificial Sequence
  Description of Artificial Sequence: Synthetic oligonucleotide
  modified_base (37)..(37): a, c, t or g
cctgaagattttgcagtttattactgtswmcagaganhcaattggcctccttwcacttttggcggagggaccaag

SEQ ID NO: 2979 - DNA, 75 bp, Artificial Sequence
  Description of Artificial Sequence: Synthetic oligonucleotide
  modified_base (40)..(40): a, c, t or g
cctgaagattttgcagtttattactgtswmcagagaagtnhctggcctccttwcacttttggcggagggaccaag

SEQ ID NO: 2980 - DNA, 75 bp, Artificial Sequence
  Description of Artificial Sequence: Synthetic oligonucleotide
cctgaagattttgcagtttattactgtswmcagagaagtaatywccctccttwcacttttggcggagggaccaag

SEQ ID NO: 2981 - DNA, 75 bp, Artificial Sequence
  Description of Artificial Sequence: Synthetic oligonucleotide
cctgaagattttgcagtttattactgtcagswmbhcagtaattggcctccttwcacttttggcggagggaccaag

SEQ ID NO: 2982 - DNA, 75 bp, Artificial Sequence
  Description of Artificial Sequence: Synthetic oligonucleotide
  modified_base (37)..(37): a, c, t or g
cctgaagattttgcagtttattactgtcagswmaganhcaattggcctccttwcacttttggcggagggaccaag

SEQ ID NO: 2983 - DNA, 75 bp, Artificial Sequence
  Description of Artificial Sequence: Synthetic oligonucleotide
  modified_base (40)..(40): a, c, t or g
cctgaagattttgcagtttattactgtcagswmagaagtnhctggcctccttwcacttttggcggagggaccaag

SEQ ID NO: 2984 - DNA, 75 bp, Artificial Sequence
  Description of Artificial Sequence: Synthetic oligonucleotide
cctgaagattttgcagtttattactgtcagswmagaagtaatywccctccttwcacttttggcggagggaccaag

SEQ ID NO: 2985 - DNA, 75 bp, Artificial Sequence
  Description of Artificial Sequence: Synthetic oligonucleotide
cctgaagattttgcagtttattactgtswmswmagaagtaattggcctcctmtcacttttggcggagggaccaag

SEQ ID NO: 2986 - DNA, 75 bp, Artificial Sequence
  Description of Artificial Sequence: Synthetic oligonucleotide
  modified_base (37)..(37): a, c, t or g
cctgaagattttgcagtttattactgtcagcagbhcnhcaattggcctcctmtcacttttggcggagggaccaag

SEQ ID NO: 2987 - DNA, 75 bp, Artificial Sequence
  Description of Artificial Sequence: Synthetic oligonucleotide
  modified_base (40)..(40): a, c, t or g
cctgaagattttgcagtttattactgtcagcagbhcagtnhctggcctcctmtcacttttggcggagggaccaag

SEQ ID NO: 2988 - DNA, 75 bp, Artificial Sequence
  Description of Artificial Sequence: Synthetic oligonucleotide
cctgaagattttgcagtttattactgtcagcagbhcagtaatywccctcctmtcacttttggcggagggaccaag

SEQ ID NO: 2989 - DNA, 75 bp, Artificial Sequence
  Description of Artificial Sequence: Synthetic oligonucleotide
  modified_base (37)..(37): a, c, t or g
  modified_base (40)..(40): a, c, t or g
cctgaagattttgcagtttattactgtcagcagaganhcnhctggcctcctmtcacttttggcggagggaccaag

SEQ ID NO: 2990 - DNA, 75 bp, Artificial Sequence
  Description of Artificial Sequence: Synthetic oligonucleotide
  modified_base (37)..(37): a, c, t or g
cctgaagattttgcagtttattactgtcagcagaganhcaatywccctcctmtcacttttggcggagggaccaag

SEQ ID NO: 2991 - DNA, 75 bp, Artificial Sequence
  Description of Artificial Sequence: Synthetic oligonucleotide
  modified_base (40)..(40): a, c, t or g
cctgaagattttgcagtttattactgtcagcagagaagtnhcywccctcctmtcacttttggcggagggaccaag

SEQ ID NO: 2992 - DNA, 75 bp, Artificial Sequence
  Description of Artificial Sequence: Synthetic oligonucleotide
cctgaagattttgcagtttattactgtswmcagbhcagtaattggcctcctmtcacttttggcggagggaccaag

SEQ ID NO: 2993 - DNA, 75 bp, Artificial Sequence
  Description of Artificial Sequence: Synthetic oligonucleotide
  modified_base (37)..(37): a, c, t or g
cctgaagattttgcagtttattactgtswmcagaganhcaattggcctcctmtcacttttggcggagggaccaag

SEQ ID NO: 2994 - DNA, 75 bp, Artificial Sequence
  Description of Artificial Sequence: Synthetic oligonucleotide
  modified_base (40)..(40): a, c, t or g
cctgaagattttgcagtttattactgtswmcagagaagtnhctggcctcctmtcacttttggcggagggaccaag

SEQ ID NO: 2995 - DNA, 75 bp, Artificial Sequence
  Description of Artificial Sequence: Synthetic oligonucleotide
cctgaagattttgcagtttattactgtswmcagagaagtaatywccctcctmtcacttttggcggagggaccaag

SEQ ID NO: 2996 - DNA, 75 bp, Artificial Sequence
  Description of Artificial Sequence: Synthetic oligonucleotide
cctgaagattttgcagtttattactgtcagswmbhcagtaattggcctcctmtcacttttggcggagggaccaag

SEQ ID NO: 2997 - DNA, 75 bp, Artificial Sequence
  Description of Artificial Sequence: Synthetic oligonucleotide
  modified_base (37)..(37): a, c, t or g
cctgaagattttgcagtttattactgtcagswmaganhcaattggcctcctmtcacttttggcggagggaccaag

SEQ ID NO: 2998 - DNA, 75 bp, Artificial Sequence
  Description of Artificial Sequence: Synthetic oligonucleotide
  modified_base (40)..(40): a, c, t or g
cctgaagattttgcagtttattactgtcagswmagaagtnhctggcctcctmtcacttttggcggagggaccaag

SEQ ID NO: 2999 - DNA, 75 bp, Artificial Sequence
  Description of Artificial Sequence: Synthetic oligonucleotide
cctgaagattttgcagtttattactgtcagswmagaagtaatywccctcctmtcacttttggcggagggaccaag

SEQ ID NO: 3000 - DNA, 75 bp, Artificial Sequence
  Description of Artificial Sequence: Synthetic oligonucleotide
cctgaagattttgcagtttattactgtswmswmagaagtaattggcctcctwggacttttggcggagggaccaag

SEQ ID NO: 3001 - DNA, 75 bp, Artificial Sequence
  Description of Artificial Sequence: Synthetic oligonucleotide
  modified_base (37)..(37): a, c, t or g
cctgaagattttgcagtttattactgtcagcagbhcnhcaattggcctcctwggacttttggcggagggaccaag

SEQ ID NO: 3002 - DNA, 75 bp, Artificial Sequence
  Description of Artificial Sequence: Synthetic oligonucleotide
  modified_base (40)..(40): a, c, t or g
cctgaagattttgcagtttattactgtcagcagbhcagtnhctggcctcctwggacttttggcggagggaccaag

SEQ ID NO: 3003 - DNA, 75 bp, Artificial Sequence
  Description of Artificial Sequence: Synthetic oligonucleotide
cctgaagattttgcagtttattactgtcagcagbhcagtaatywccctcctwggacttttggcggagggaccaag

SEQ ID NO: 3004 - DNA, 75 bp, Artificial Sequence
  Description of Artificial Sequence: Synthetic oligonucleotide
  modified_base (37)..(37): a, c, t or g
  modified_base (40)..(40): a, c, t or g
cctgaagattttgcagtttattactgtcagcagaganhcnhctggcctcctwggacttttggcggagggaccaag

SEQ ID NO: 3005 - DNA, 75 bp, Artificial Sequence
  Description of Artificial Sequence: Synthetic oligonucleotide
  modified_base (37)..(37): a, c, t or g
cctgaagattttgcagtttattactgtcagcagaganhcaatywccctcctwggacttttggcggagggaccaag

SEQ ID NO: 3006 - DNA, 75 bp, Artificial Sequence
  Description of Artificial Sequence: Synthetic oligonucleotide
  modified_base (40)..(40): a, c, t or g
cctgaagattttgcagtttattactgtcagcagagaagtnhcywccctcctwggacttttggcggagggaccaag

SEQ ID NO: 3007 - DNA, 75 bp, Artificial Sequence
  Description of Artificial Sequence: Synthetic oligonucleotide
cctgaagattttgcagtttattactgtswmcagbhcagtaattggcctcctwggacttttggcggagggaccaag

SEQ ID NO: 3008 - DNA, 75 bp, Artificial Sequence
  Description of Artificial Sequence: Synthetic oligonucleotide
  modified_base (37)..(37): a, c, t or g
cctgaagattttgcagtttattactgtswmcagaganhcaattggcctcctwggacttttggcggagggaccaag

SEQ ID NO: 3009 - DNA, 75 bp, Artificial Sequence
  Description of Artificial Sequence: Synthetic oligonucleotide
  modified_base (40)..(40): a, c, t or g
cctgaagattttgcagtttattactgtswmcagagaagtnhctggcctcctwggacttttggcggagggaccaag

SEQ ID NO: 3010 - DNA, 75 bp, Artificial Sequence
  Description of Artificial Sequence: Synthetic oligonucleotide
cctgaagattttgcagtttattactgtswmcagagaagtaatywccctcctwggacttttggcggagggaccaag

SEQ ID NO: 3011 - DNA, 75 bp, Artificial Sequence
  Description of Artificial Sequence: Synthetic oligonucleotide
cctgaagattttgcagtttattactgtcagswmbhcagtaattggcctcctwggacttttggcggagggaccaag

SEQ ID NO: 3012 - DNA, 75 bp, Artificial Sequence
  Description of Artificial Sequence: Synthetic oligonucleotide
  modified_base (37)..(37): a, c, t or g
cctgaagattttgcagtttattactgtcagswmaganhcaattggcctcctwggacttttggcggagggaccaag

SEQ ID NO: 3013 - DNA, 75 bp, Artificial Sequence
  Description of Artificial Sequence: Synthetic oligonucleotide
  modified_base (40)..(40): a, c, t or g
cctgaagattttgcagtttattactgtcagswmagaagtnhctggcctcctwggacttttggcggagggaccaag

SEQ ID NO: 3014 - DNA, 75 bp, Artificial Sequence
  Description of Artificial Sequence: Synthetic oligonucleotide
cctgaagattttgcagtttattactgtcagswmagaagtaatywccctcctwggacttttggcggagggaccaag

SEQ ID NO: 3015 - DNA, 78 bp, Artificial Sequence
  Description of Artificial Sequence: Synthetic oligonucleotide
cagtctgaagattttgcagtttattactgtswmswmtacaataattggcctccttwcacttttggcggagggaccaag

SEQ ID NO: 3016 - DNA, 78 bp, Artificial Sequence
  Description of Artificial Sequence: Synthetic oligonucleotide
  modified_base (40)..(40): a, c, t or g
cagtctgaagattttgcagtttattactgtcagcagbhcnhcaattggcctccttwcacttttggcggagggaccaag

SEQ ID NO: 3017 - DNA, 78 bp, Artificial Sequence
  Description of Artificial Sequence: Synthetic oligonucleotide
  modified_base (43)..(43): a, c, t or g
cagtctgaagattttgcagtttattactgtcagcagbhcaatnhctggcctccttwcacttttggcggagggaccaag

SEQ ID NO: 3018 - DNA, 78 bp, Artificial Sequence
  Description of Artificial Sequence: Synthetic oligonucleotide
cagtctgaagattttgcagtttattactgtcagcagbhcaataatywccctccttwcacttttggcggagggaccaag

SEQ ID NO: 3019 - DNA, 78 bp, Artificial Sequence
  Description of Artificial Sequence: Synthetic oligonucleotide
  modified_base (40)..(40): a, c, t or g
  modified_base (43)..(43): a, c, t or g
cagtctgaagattttgcagtttattactgtcagcagtacnhcnhctggcctccttwcacttttggcggagggaccaag

SEQ ID NO: 3020 - DNA, 78 bp, Artificial Sequence
  Description of Artificial Sequence: Synthetic oligonucleotide
  modified_base (40)..(40): a, c, t or g
cagtctgaagattttgcagtttattactgtcagcagtacnhcaatywccctccttwcacttttggcggagggaccaag

SEQ ID NO: 3021 - DNA, 78 bp, Artificial Sequence
  Description of Artificial Sequence: Synthetic oligonucleotide
  modified_base (43)..(43): a, c, t or g
cagtctgaagattttgcagtttattactgtcagcagtacaatnhcywccctccttwcacttttggcggagggaccaag

SEQ ID NO: 3022 - DNA, 78 bp, Artificial Sequence
  Description of Artificial Sequence: Synthetic oligonucleotide
cagtctgaagattttgcagtttattactgtswmcagbhcaataattggcctccttwcacttttggcggagggaccaag

SEQ ID NO: 3023 - DNA, 78 bp, Artificial Sequence
  Description of Artificial Sequence: Synthetic oligonucleotide
  modified_base (40)..(40): a, c, t or g
cagtctgaagattttgcagtttattactgtswmcagtacnhcaattggcctccttwcacttttggcggagggaccaag

SEQ ID NO: 3024 - DNA, 78 bp, Artificial Sequence
  Description of Artificial Sequence: Synthetic oligonucleotide
  modified_base (43)..(43): a, c, t or g
cagtctgaagattttgcagtttattactgtswmcagtacaatnhctggcctccttwcacttttggcggagggaccaag

SEQ ID NO: 3025 - DNA, 78 bp, Artificial Sequence
  Description of Artificial Sequence: Synthetic oligonucleotide
cagtctgaagattttgcagtttattactgtswmcagtacaataatywccctccttwcacttttggcggagggaccaag

SEQ ID NO: 3026 - DNA, 78 bp, Artificial Sequence
  Description of Artificial Sequence: Synthetic oligonucleotide
cagtctgaagattttgcagtttattactgtcagswmbhcaataattggcctccttwcacttttggcggagggaccaag

SEQ ID NO: 3027 - DNA, 78 bp, Artificial Sequence
  Description of Artificial Sequence: Synthetic oligonucleotide
  modified_base (40)..(40): a, c, t or g
cagtctgaagattttgcagtttattactgtcagswmtacnhcaattggcctccttwcacttttggcggagggaccaag

SEQ ID NO: 3028 - DNA, 78 bp, Artificial Sequence
  Description of Artificial Sequence: Synthetic oligonucleotide
  modified_base (43)..(43): a, c, t or g
cagtctgaagattttgcagtttattactgtcagswmtacaatnhctggcctccttwcacttttggcggagggaccaag

SEQ ID NO: 3029 - DNA, 78 bp, Artificial Sequence
  Description of Artificial Sequence: Synthetic oligonucleotide
cagtctgaagattttgcagtttattactgtcagswmtacaataatywccctccttwcacttttggcggagggaccaag

SEQ ID NO: 3030 - DNA, 78 bp, Artificial Sequence
  Description of Artificial Sequence: Synthetic oligonucleotide
cagtctgaagattttgcagtttattactgtswmswmtacaataattggcctcctmtcacttttggcggagggaccaag

SEQ ID NO: 3031 - DNA, 78 bp, Artificial Sequence
  Description of Artificial Sequence: Synthetic oligonucleotide
  modified_base (40)..(40): a, c, t or g
cagtctgaagattttgcagtttattactgtcagcagbhcnhcaattggcctcctmtcacttttggcggagggaccaag

SEQ ID NO: 3032 - DNA, 78 bp, Artificial Sequence
  Description of Artificial Sequence: Synthetic oligonucleotide
  modified_base (43)..(43): a, c, t or g
cagtctgaagattttgcagtttattactgtcagcagbhcaatnhctggcctcctmtcacttttggcggagggaccaag

SEQ ID NO: 3033 - DNA, 78 bp, Artificial Sequence
  Description of Artificial Sequence: Synthetic oligonucleotide
cagtctgaagattttgcagtttattactgtcagcagbhcaataatywccctcctmtcacttttggcggagggaccaag

SEQ ID NO: 3034 - DNA, 78 bp, Artificial Sequence
  Description of Artificial Sequence: Synthetic oligonucleotide
  modified_base (40)..(40): a, c, t or g
  modified_base (43)..(43): a, c, t or g
cagtctgaagattttgcagtttattactgtcagcagtacnhcnhctggcctcctmtcacttttggcggagggaccaag

SEQ ID NO: 3035 - DNA, 78 bp, Artificial Sequence
  Description of Artificial Sequence: Synthetic oligonucleotide
  modified_base (40)..(40): a, c, t or g
cagtctgaagattttgcagtttattactgtcagcagtacnhcaatywccctcctmtcacttttggcggagggaccaag

SEQ ID NO: 3036 - DNA, 78 bp, Artificial Sequence
  Description of Artificial Sequence: Synthetic oligonucleotide
  modified_base (43)..(43): a, c, t or g
cagtctgaagattttgcagtttattactgtcagcagtacaatnhcywccctcctmtcacttttggcggagggaccaag

SEQ ID NO: 3037 - DNA, 78 bp, Artificial Sequence
  Description of Artificial Sequence: Synthetic oligonucleotide
cagtctgaagattttgcagtttattactgtswmcagbhcaataattggcctcctmtcacttttggcggagggaccaag

SEQ ID NO: 3038 - DNA, 78 bp, Artificial Sequence
  Description of Artificial Sequence: Synthetic oligonucleotide
  modified_base (40)..(40): a, c, t or g
cagtctgaagattttgcagtttattactgtswmcagtacnhcaattggcctcctmtcacttttggcggagggaccaag

SEQ ID NO: 3039 - DNA, 78 bp, Artificial Sequence
  Description of Artificial Sequence: Synthetic oligonucleotide
  modified_base (43)..(43): a, c, t or g
cagtctgaagattttgcagtttattactgtswmcagtacaatnhctggcctcctmtcacttttggcggagggaccaag

SEQ ID NO: 3040 - DNA, 78 bp, Artificial Sequence
  Description of Artificial Sequence: Synthetic oligonucleotide
cagtctgaagattttgcagtttattactgtswmcagtacaataatywccctcctmtcacttttggcggagggaccaag

SEQ ID NO: 3041 - DNA, 78 bp, Artificial Sequence
  Description of Artificial Sequence: Synthetic oligonucleotide
cagtctgaagattttgcagtttattactgtcagswmbhcaataattggcctcctmtcacttttggcggagggaccaag

SEQ ID NO: 3042 - DNA, 78 bp, Artificial Sequence
  Description of Artificial Sequence: Synthetic oligonucleotide
  modified_base (40)..(40): a, c, t or g
cagtctgaagattttgcagtttattactgtcagswmtacnhcaattggcctcctmtcacttttggcggagggaccaag

SEQ ID NO: 3043 - DNA, 78 bp, Artificial Sequence
  Description of Artificial Sequence: Synthetic oligonucleotide
  modified_base (43)..(43): a, c, t or g
cagtctgaagattttgcagtttattactgtcagswmtacaatnhctggcctcctmtcacttttggcggagggaccaag

SEQ ID NO: 3044 - DNA, 78 bp, Artificial Sequence
  Description of Artificial Sequence: Synthetic oligonucleotide
cagtctgaagattttgcagtttattactgtcagswmtacaataatywccctcctmtcacttttggcggagggaccaag

SEQ ID NO: 3045 - DNA, 78 bp, Artificial Sequence
  Description of Artificial Sequence: Synthetic oligonucleotide
cagtctgaagattttgcagtttattactgtswmswmtacaataattggcctcctwggacttttggcggagggaccaag

SEQ ID NO: 3046 - DNA, 78 bp, Artificial Sequence
  Description of Artificial Sequence: Synthetic oligonucleotide
  modified_base (40)..(40): a, c, t or g
cagtctgaagattttgcagtttattactgtcagcagbhcnhcaattggcctcctwggacttttggcggagggaccaag

SEQ ID NO: 3047 - DNA, 78 bp, Artificial Sequence
  Description of Artificial Sequence: Synthetic oligonucleotide
  modified_base (43)..(43): a, c, t or g
cagtctgaagattttgcagtttattactgtcagcagbhcaatnhctggcctcctwggacttttggcggagggaccaag

SEQ ID NO: 3048 - DNA, 78 bp, Artificial Sequence
  Description of Artificial Sequence: Synthetic oligonucleotide
cagtctgaagattttgcagtttattactgtcagcagbhcaataatywccctcctwggacttttggcggagggaccaag

SEQ ID NO: 3049 - DNA, 78 bp, Artificial Sequence
  Description of Artificial Sequence: Synthetic oligonucleotide
  modified_base (40)..(40): a, c, t or g
  modified_base (43)..(43): a, c, t or g
cagtctgaagattttgcagtttattactgtcagcagtacnhcnhctggcctcctwggacttttggcggagggaccaag

SEQ ID NO: 3050 - DNA, 78 bp, Artificial Sequence
  Description of Artificial Sequence: Synthetic oligonucleotide
  modified_base (40)..(40): a, c, t or g
cagtctgaagattttgcagtttattactgtcagcagtacnhcaatywccctcctwggacttttggcggagggaccaag

SEQ ID NO: 3051 - DNA, 78 bp, Artificial Sequence
  Description of Artificial Sequence: Synthetic oligonucleotide
  modified_base (43)..(43): a, c, t or g
cagtctgaagattttgcagtttattactgtcagcagtacaatnhcywccctcctwggacttttggcggagggaccaag

SEQ ID NO: 3052 - DNA, 78 bp, Artificial Sequence
  Description of Artificial Sequence: Synthetic oligonucleotide
cagtctgaagattttgcagtttattactgtswmcagbhcaataattggcctcctwggacttttggcggagggaccaag

SEQ ID NO: 3053 - DNA, 78 bp, Artificial Sequence
  Description of Artificial Sequence: Synthetic oligonucleotide
  modified_base (40)..(40): a, c, t or g
cagtctgaagattttgcagtttattactgtswmcagtacnhcaattggcctcctwggacttttggcggagggaccaag

SEQ ID NO: 3054 - DNA, 78 bp, Artificial Sequence
  Description of Artificial Sequence: Synthetic oligonucleotide
  modified_base (43)..(43): a, c, t or g
cagtctgaagattttgcagtttattactgtswmcagtacaatnhctggcctcctwggacttttggcggagggaccaag

SEQ ID NO: 3055 - DNA, 78 bp, Artificial Sequence
  Description of Artificial Sequence: Synthetic oligonucleotide
cagtctgaagattttgcagtttattactgtswmcagtacaataatywccctcctwggacttttggcggagggaccaag

SEQ ID NO: 3056 - DNA, 78 bp, Artificial Sequence
  Description of Artificial Sequence: Synthetic oligonucleotide
cagtctgaagattttgcagtttattactgtcagswmbhcaataattggcctcctwggacttttggcggagggaccaag

SEQ ID NO: 3057 - DNA, 78 bp, Artificial Sequence
  Description of Artificial Sequence: Synthetic oligonucleotide
  modified_base (40)..(40): a, c, t or g
cagtctgaagattttgcagtttattactgtcagswmtacnhcaattggcctcctwggacttttggcggagggaccaag

SEQ ID NO: 3058 - DNA, 78 bp, Artificial Sequence
  Description of Artificial Sequence: Synthetic oligonucleotide
  modified_base (43)..(43): a, c, t or g
cagtctgaagattttgcagtttattactgtcagswmtacaatnhctggcctcctwggacttttggcggagggaccaag

SEQ ID NO: 3059 - DNA, 78 bp, Artificial Sequence
  Description of Artificial Sequence: Synthetic oligonucleotide
cagtctgaagattttgcagtttattactgtcagswmtacaataatywccctcctwggacttttggcggagggaccaag

SEQ ID NO: 3060 - DNA, 75 bp, Artificial Sequence
  Description of Artificial Sequence: Synthetic oligonucleotide
cctgaagattttgcagtgtattactgtswmswmtacggaagtagtcctccttwcacttttggcggagggaccaag

SEQ ID NO: 3061 - DNA, 75 bp, Artificial Sequence
  Description of Artificial Sequence: Synthetic oligonucleotide
cctgaagattttgcagtgtattactgtcagcagbhcbhcagtagtcctccttwcacttttggcggagggaccaag

SEQ ID NO: 3062 - DNA, 75 bp, Artificial Sequence
  Description of Artificial Sequence: Synthetic oligonucleotide
  modified_base (41)..(41): a, c, t or g
cctgaagattttgcagtgtattactgtcagcagbhcggavncagtcctccttwcacttttggcggagggaccaag

SEQ ID NO: 3063 - DNA, 75 bp, Artificial Sequence
  Description of Artificial Sequence: Synthetic oligonucleotide
cctgaagattttgcagtgtattactgtcagcagbhcggaagtbhccctccttwcacttttggcggagggaccaag

SEQ ID NO: 3064 - DNA, 75 bp, Artificial Sequence
  Description of Artificial Sequence: Synthetic oligonucleotide
  modified_base (41)..(41): a, c, t or g
cctgaagattttgcagtgtattactgtcagcagtacbhcvncagtcctccttwcacttttggcggagggaccaag

SEQ ID NO: 3065 - DNA, 75 bp, Artificial Sequence
  Description of Artificial Sequence: Synthetic oligonucleotide
cctgaagattttgcagtgtattactgtcagcagtacbhcagtbhccctccttwcacttttggcggagggaccaag

SEQ ID NO: 3066 - DNA, 75 bp, Artificial Sequence
  Description of Artificial Sequence: Synthetic oligonucleotide
  modified_base (41)..(41): a, c, t or g
cctgaagattttgcagtgtattactgtcagcagtacggavncbhccctccttwcacttttggcggagggaccaag

SEQ ID NO: 3067 - DNA, 75 bp, Artificial Sequence
  Description of Artificial Sequence: Synthetic oligonucleotide
cctgaagattttgcagtgtattactgtswmcagbhcggaagtagtcctccttwcacttttggcggagggaccaag

SEQ ID NO: 3068 - DNA, 75 bp, Artificial Sequence
  Description of Artificial Sequence: Synthetic oligonucleotide
cctgaagattttgcagtgtattactgtswmcagtacbhcagtagtcctccttwcacttttggcggagggaccaag

SEQ ID NO: 3069 - DNA, 75 bp, Artificial Sequence
  Description of Artificial Sequence: Synthetic oligonucleotide
  modified_base (41)..(41): a, c, t or g
cctgaagattttgcagtgtattactgtswmcagtacggavncagtcctccttwcacttttggcggagggaccaag

SEQ ID NO: 3070 - DNA, 75 bp, Artificial Sequence
  Description of Artificial Sequence: Synthetic oligonucleotide
cctgaagattttgcagtgtattactgtswmcagtacggaagtbhccctccttwcacttttggcggagggaccaag

SEQ ID NO: 3071 - DNA, 75 bp, Artificial Sequence
  Description of Artificial Sequence: Synthetic oligonucleotide
cctgaagattttgcagtgtattactgtcagswmbhcggaagtagtcctccttwcacttttggcggagggaccaag

SEQ ID NO: 3072 - DNA, 75 bp, Artificial Sequence
  Description of Artificial Sequence: Synthetic oligonucleotide
cctgaagattttgcagtgtattactgtcagswmtacbhcagtagtcctccttwcacttttggcggagggaccaag

SEQ ID NO: 3073 - DNA, 75 bp, Artificial Sequence
  Description of Artificial Sequence: Synthetic oligonucleotide
  modified_base (41)..(41): a, c, t or g
cctgaagattttgcagtgtattactgtcagswmtacggavncagtcctccttwcacttttggcggagggaccaag

SEQ ID NO: 3074 - DNA, 75 bp, Artificial Sequence
  Description of Artificial Sequence: Synthetic oligonucleotide
cctgaagattttgcagtgtattactgtcagswmtacggaagtbhccctccttwcacttttggcggagggaccaag

SEQ ID NO: 3075 - DNA, 75 bp, Artificial Sequence
  Description of Artificial Sequence: Synthetic oligonucleotide
cctgaagattttgcagtgtattactgtswmswmtacggaagtagtcctcctmtcacttttggcggagggaccaag

SEQ ID NO: 3076 - DNA, 75 bp, Artificial Sequence
  Description of Artificial Sequence: Synthetic oligonucleotide
cctgaagattttgcagtgtattactgtcagcagbhcbhcagtagtcctcctmtcacttttggcggagggaccaag

SEQ ID NO: 3077 - DNA, 75 bp, Artificial Sequence
  Description of Artificial Sequence: Synthetic oligonucleotide
  modified_base (41)..(41): a, c, t or g
cctgaagattttgcagtgtattactgtcagcagbhcggavncagtcctcctmtcacttttggcggagggaccaag

SEQ ID NO: 3078 - DNA, 75 bp, Artificial Sequence
  Description of Artificial Sequence: Synthetic oligonucleotide
cctgaagattttgcagtgtattactgtcagcagbhcggaagtbhccctcctmtcacttttggcggagggaccaag

SEQ ID NO: 3079 - DNA, 75 bp, Artificial Sequence
  Description of Artificial Sequence: Synthetic oligonucleotide
  modified_base (41)..(41): a, c, t or g
cctgaagattttgcagtgtattactgtcagcagtacbhcvncagtcctcctmtcacttttggcggagggaccaag

SEQ ID NO: 3080 - DNA, 75 bp, Artificial Sequence
  Description of Artificial Sequence: Synthetic oligonucleotide
cctgaagattttgcagtgtattactgtcagcagtacbhcagtbhccctcctmtcacttttggcggagggaccaag

SEQ ID NO: 3081 - DNA, 75 bp, Artificial Sequence
  Description of Artificial Sequence: Synthetic oligonucleotide
  modified_base (41)..(41): a, c, t or g
cctgaagattttgcagtgtattactgtcagcagtacggavncbhccctcctmtcacttttggcggagggaccaag

SEQ ID NO: 3082 - DNA, 75 bp, Artificial Sequence
  Description of Artificial Sequence: Synthetic oligonucleotide
cctgaagattttgcagtgtattactgtswmcagbhcggaagtagtcctcctmtcacttttggcggagggaccaag

SEQ ID NO: 3083 - DNA, 75 bp, Artificial Sequence
  Description of Artificial Sequence: Synthetic oligonucleotide
cctgaagattttgcagtgtattactgtswmcagtacbhcagtagtcctcctmtcacttttggcggagggaccaag

SEQ ID NO: 3084 - DNA, 75 bp, Artificial Sequence
  Description of Artificial Sequence: Synthetic oligonucleotide
  modified_base (41)..(41): a, c, t or g
cctgaagattttgcagtgtattactgtswmcagtacggavncagtcctcctmtcacttttggcggagggaccaag

SEQ ID NO: 3085 - DNA, 75 bp, Artificial Sequence
  Description of Artificial Sequence: Synthetic oligonucleotide
cctgaagattttgcagtgtattactgtswmcagtacggaagtbhccctcctmtcacttttggcggagggaccaag

SEQ ID NO: 3086 - DNA, 75 bp, Artificial Sequence
  Description of Artificial Sequence: Synthetic oligonucleotide
cctgaagattttgcagtgtattactgtcagswmbhcggaagtagtcctcctmtcacttttggcggagggaccaag

SEQ ID NO: 3087 - DNA, 75 bp, Artificial Sequence
  Description of Artificial Sequence: Synthetic oligonucleotide
cctgaagattttgcagtgtattactgtcagswmtacbhcagtagtcctcctmtcacttttggcggagggaccaag

SEQ ID NO: 3088 - DNA, 75 bp, Artificial Sequence
  Description of Artificial Sequence: Synthetic oligonucleotide
  modified_base (41)..(41): a, c, t or g
cctgaagattttgcagtgtattactgtcagswmtacggavncagtcctcctmtcacttttggcggagggaccaag

SEQ ID NO: 3089 - DNA, 75 bp, Artificial Sequence
  Description of Artificial Sequence: Synthetic oligonucleotide
cctgaagattttgcagtgtattactgtcagswmtacggaagtbhccctcctmtcacttttggcggagggaccaag

SEQ ID NO: 3090 - DNA, 75 bp, Artificial Sequence
  Description of Artificial Sequence: Synthetic oligonucleotide
cctgaagattttgcagtgtattactgtswmswmtacggaagtagtcctcctwggacttttggcggagggaccaag

SEQ ID NO: 3091 - DNA, 75 bp, Artificial Sequence
  Description of Artificial Sequence: Synthetic oligonucleotide
cctgaagattttgcagtgtattactgtcagcagbhcbhcagtagtcctcctwggacttttggcggagggaccaag

SEQ ID NO: 3092 - DNA, 75 bp, Artificial Sequence
  Description of Artificial Sequence: Synthetic oligonucleotide
  modified_base (41)..(41): a, c, t or g
cctgaagattttgcagtgtattactgtcagcagbhcggavncagtcctcctwggacttttggcggagggaccaag

SEQ ID NO: 3093 - DNA, 75 bp, Artificial Sequence
  Description of Artificial Sequence: Synthetic oligonucleotide
cctgaagattttgcagtgtattactgtcagcagbhcggaagtbhccctcctwggacttttggcggagggaccaag

SEQ ID NO: 3094 - DNA, 75 bp, Artificial Sequence
  Description of Artificial Sequence: Synthetic oligonucleotide
  modified_base (41)..(41): a, c, t or g
cctgaagattttgcagtgtattactgtcagcagtacbhcvncagtcctcctwggacttttggcggagggaccaag

SEQ ID NO: 3095 - DNA, 75 bp, Artificial Sequence
  Description of Artificial Sequence: Synthetic oligonucleotide
cctgaagattttgcagtgtattactgtcagcagtacbhcagtbhccctcctwggacttttggcggagggaccaag

SEQ ID NO: 3096 - DNA, 75 bp, Artificial Sequence
  Description of Artificial Sequence: Synthetic oligonucleotide
  modified_base (41)..(41): a, c, t or g
cctgaagattttgcagtgtattactgtcagcagtacggavncbhccctcctwggacttttggcggagggaccaag

SEQ ID NO: 3097 - DNA, 75 bp, Artificial Sequence
  Description of Artificial Sequence: Synthetic oligonucleotide
cctgaagattttgcagtgtattactgtswmcagbhcggaagtagtcctcctwggacttttggcggagggaccaag

SEQ ID NO: 3098 - DNA, 75 bp, Artificial Sequence
  Description of Artificial Sequence: Synthetic oligonucleotide
cctgaagattttgcagtgtattactgtswmcagtacbhcagtagtcctcctwggacttttggcggagggaccaag

SEQ ID NO: 3099 - DNA, 75 bp, Artificial Sequence
  Description of Artificial Sequence: Synthetic oligonucleotide
  modified_base (41)..(41): a, c, t or g
cctgaagattttgcagtgtattactgtswmcagtacggavncagtcctcctwggacttttggcggagggaccaag

SEQ ID NO: 3100 - DNA, 75 bp, Artificial Sequence
  Description of Artificial Sequence: Synthetic oligonucleotide
cctgaagattttgcagtgtattactgtswmcagtacggaagtbhccctcctwggacttttggcggagggaccaag

SEQ ID NO: 3101 - DNA, 75 bp, Artificial Sequence
  Description of Artificial Sequence: Synthetic oligonucleotide
cctgaagattttgcagtgtattactgtcagswmbhcggaagtagtcctcctwggacttttggcggagggaccaag

SEQ ID NO: 3102 - DNA, 75 bp, Artificial Sequence
  Description of Artificial Sequence: Synthetic oligonucleotide
cctgaagattttgcagtgtattactgtcagswmtacbhcagtagtcctcctwggacttttggcggagggaccaag

SEQ ID NO: 3103 - DNA, 75 bp, Artificial Sequence
  Description of Artificial Sequence: Synthetic oligonucleotide
  modified_base (41)..(41): a, c, t or g
cctgaagattttgcagtgtattactgtcagswmtacggavncagtcctcctwggacttttggcggagggaccaag

SEQ ID NO: 3104 - DNA, 75 bp, Artificial Sequence
  Description of Artificial Sequence: Synthetic oligonucleotide
cctgaagattttgcagtgtattactgtcagswmtacggaagtbhccctcctwggacttttggcggagggaccaag

SEQ ID NO: 3105 - DNA, 75 bp, Artificial Sequence
  Description of Artificial Sequence: Synthetic oligonucleotide
cctgatgattttgcaacttattactgccagcagbhcvrmmbctacyctccttwcacttttggcggagggaccaag

SEQ ID NO: 3106 - DNA, 75 bp, Artificial Sequence
  Description of Artificial Sequence: Synthetic oligonucleotide
cctgatgattttgcaacttattactgccagcagbhcvrmmbctacyctcctmtcacttttggcggagggaccaag

SEQ ID NO: 3107 - DNA, 75 bp, Artificial Sequence
  Description of Artificial Sequence: Synthetic oligonucleotide
cctgatgattttgcaacttattactgccagcagbhcvrmmbctacyctcctwggacttttggcggagggaccaag

SEQ ID NO: 3108 - DNA, 75 bp, Artificial Sequence
  Description of Artificial Sequence: Synthetic oligonucleotide
cctgatgattttgcaacttattactgccagcagbhcaatmbcywcyctccttwcacttttggcggagggaccaag

SEQ ID NO: 3109 - DNA, 75 bp, Artificial Sequence
  Description of Artificial Sequence: Synthetic oligonucleotide
cctgatgattttgcaacttattactgccagcagbhcaatmbcywcyctcctmtcacttttggcggagggaccaag

SEQ ID NO: 3110 - DNA, 75 bp, Artificial Sequence
  Description of Artificial Sequence: Synthetic oligonucleotide
cctgatgattttgcaacttattactgccagcagbhcaatmbcywcyctcctwggacttttggcggagggaccaag

SEQ ID NO: 3111 - DNA, 75 bp, Artificial Sequence
  Description of Artificial Sequence: Synthetic oligonucleotide
cctgatgattttgcaacttattactgccagcagbhcvrmagtywcyctccttwcacttttggcggagggaccaag

SEQ ID NO: 3112 - DNA, 75 bp, Artificial Sequence
  Description of Artificial Sequence: Synthetic oligonucleotide
cctgatgattttgcaacttattactgccagcagbhcvrmagtywcyctcctmtcacttttggcggagggaccaag

SEQ ID NO: 3113 - DNA, 75 bp, Artificial Sequence
  Description of Artificial Sequence: Synthetic oligonucleotide
cctgatgattttgcaacttattactgccagcagbhcvrmagtywcyctcctwggacttttggcggagggaccaag

SEQ ID NO: 3114 - DNA, 75 bp, Artificial Sequence
  Description of Artificial Sequence: Synthetic oligonucleotide
cctgatgattttgcaacttattactgccagcagtacvrmmbcywcyctccttwcacttttggcggagggaccaag

SEQ ID NO: 3115 - DNA, 75 bp, Artificial Sequence
  Description of Artificial Sequence: Synthetic oligonucleotide
cctgatgattttgcaacttattactgccagcagtacvrmmbcywcyctcctmtcacttttggcggagggaccaag

SEQ ID NO: 3116 - DNA, 75 bp, Artificial Sequence
  Description of Artificial Sequence: Synthetic oligonucleotide
cctgatgattttgcaacttattactgccagcagtacvrmmbcywcyctcctwggacttttggcggagggaccaag

SEQ ID NO: 3117 - DNA, 75 bp, Artificial Sequence
  Description of Artificial Sequence: Synthetic oligonucleotide
  modified_base (35)..(35): a, c, t or g
  modified_base (37)..(37): a, c, t or g
  modified_base (40)..(40): a, c, t or g
cctgaagattttgcaacttattactgtcagcagrnanhcnhcttccctccttwcacttttggcggagggaccaag

SEQ ID NO: 3118 - DNA, 75 bp, Artificial Sequence
  Description of Artificial Sequence: Synthetic oligonucleotide
  modified_base (35)..(35): a, c, t or g
  modified_base (37)..(37): a, c, t or g
  modified_base (40)..(40): a, c, t or g
cctgaagattttgcaacttattactgtcagcagrnanhcnhcttccctcctmtcacttttggcggagggaccaag

SEQ ID NO: 3119 - DNA, 75 bp, Artificial Sequence
  Description of Artificial Sequence: Synthetic oligonucleotide
  modified_base (35)..(35): a, c, t or g
  modified_base (37)..(37): a, c, t or g
  modified_base (40)..(40): a, c, t or g
cctgaagattttgcaacttattactgtcagcagrnanhcnhcttccctcctwggacttttggcggagggaccaag

SEQ ID NO: 3120 - DNA, 75 bp, Artificial Sequence
  Description of Artificial Sequence: Synthetic oligonucleotide
  modified_base (35)..(35): a, c, t or g
  modified_base (37)..(37): a, c, t or g
cctgaagattttgcaacttattactgtcagcagrnanhcagtywccctccttwcacttttggcggagggaccaag

SEQ ID NO: 3121 - DNA, 75 bp, Artificial Sequence
  Description of Artificial Sequence: Synthetic oligonucleotide
  modified_base (35)..(35): a, c, t or g
  modified_base (37)..(37): a, c, t or g
cctgaagattttgcaacttattactgtcagcagrnanhcagtywccctcctmtcacttttggcggagggaccaag

SEQ ID NO: 3122 - DNA, 75 bp, Artificial Sequence
  Description of Artificial Sequence: Synthetic oligonucleotide
  modified_base (35)..(35): a, c, t or g
  modified_base (37)..(37): a, c, t or g
cctgaagattttgcaacttattactgtcagcagrnanhcagtywccctcctwggacttttggcggagggaccaag

SEQ ID NO: 3123 - DNA, 75 bp, Artificial Sequence
  Description of Artificial Sequence: Synthetic oligonucleotide
  modified_base (35)..(35): a, c, t or g
  modified_base (40)..(40): a, c, t or g
cctgaagattttgcaacttattactgtcagcagrnaaatnhcywccctccttwcacttttggcggagggaccaag

SEQ ID NO: 3124 - DNA, 75 bp, Artificial Sequence
  Description of Artificial Sequence: Synthetic oligonucleotide
  modified_base (35)..(35): a, c, t or g
  modified_base (40)..(40): a, c, t or g
cctgaagattttgcaacttattactgtcagcagrnaaatnhcywccctcctmtcacttttggcggagggaccaag

SEQ ID NO: 3125 - DNA, 75 bp, Artificial Sequence
  Description of Artificial Sequence: Synthetic oligonucleotide
  modified_base (35)..(35): a, c, t or g
  modified_base (40)..(40): a, c, t or g
cctgaagattttgcaacttattactgtcagcagrnaaatnhcywccctcctwggacttttggcggagggaccaag

SEQ ID NO: 3126 - DNA, 75 bp, Artificial Sequence
  Description of Artificial Sequence: Synthetic oligonucleotide
  modified_base (37)..(37): a, c, t or g
  modified_base (40)..(40): a, c, t or g
cctgaagattttgcaacttattactgtcagcaggcanhcnhcywccctccttwcacttttggcggagggaccaag

SEQ ID NO: 3127 - DNA, 75 bp, Artificial Sequence
  Description of Artificial Sequence: Synthetic oligonucleotide
  modified_base (37)..(37): a, c, t or g
  modified_base (40)..(40): a, c, t or g
cctgaagattttgcaacttattactgtcagcaggcanhcnhcywccctcctmtcacttttggcggagggaccaag

SEQ ID NO: 3128 - DNA, 75 bp, Artificial Sequence
  Description of Artificial Sequence: Synthetic oligonucleotide
  modified_base (37)..(37): a, c, t or g
  modified_base (40)..(40): a, c, t or g
cctgaagattttgcaacttattactgtcagcaggcanhcnhcywccctcctwggacttttggcggagggaccaag

SEQ ID NO: 3129 - DNA, 75 bp, Artificial Sequence
  Description of Artificial Sequence: Synthetic oligonucleotide
  modified_base (37)..(37): a, c, t or g
  modified_base (40)..(40): a, c, t or g
cctgaagatattgcaacatattactgtcagcagbhcnhcnhcctccctccttwcacttttggcggagggaccaag

SEQ ID NO: 3130 - DNA, 75 bp, Artificial Sequence
  Description of Artificial Sequence: Synthetic oligonucleotide
  modified_base (37)..(37): a, c, t or g
  modified_base (40)..(40): a, c, t or g
cctgaagatattgcaacatattactgtcagcagbhcnhcnhcctccctcctmtcacttttggcggagggaccaag

SEQ ID NO: 3131 - DNA, 75 bp, Artificial Sequence
  Description of Artificial Sequence: Synthetic oligonucleotide
  modified_base (37)..(37): a, c, t or g
  modified_base (40)..(40): a, c, t or g
cctgaagatattgcaacatattactgtcagcagbhcnhcnhcctccctcctwggacttttggcggagggaccaag

SEQ ID NO: 3132 - DNA, 75 bp, Artificial Sequence
  Description of Artificial Sequence: Synthetic oligonucleotide
  modified_base (37)..(37): a, c, t or g
cctgaagatattgcaacatattactgtcagcagbhcnhcaatywccctccttwcacttttggcggagggaccaag

SEQ ID NO: 3133 - DNA, 75 bp, Artificial Sequence
  Description of Artificial Sequence: Synthetic oligonucleotide
  modified_base (37)..(37): a, c, t or g
cctgaagatattgcaacatattactgtcagcagbhcnhcaatywccctcctmtcacttttggcggagggaccaag

SEQ ID NO: 3134 - DNA, 75 bp, Artificial Sequence
  Description of Artificial Sequence: Synthetic oligonucleotide
  modified_base (37)..(37): a, c, t or g
cctgaagatattgcaacatattactgtcagcagbhcnhcaatywccctcctwggacttttggcggagggaccaag

SEQ ID NO: 3135 - DNA, 75 bp, Artificial Sequence
  Description of Artificial Sequence: Synthetic oligonucleotide
  modified_base (40)..(40): a, c, t or g
cctgaagatattgcaacatattactgtcagcagbhcgatnhcywccctccttwcacttttggcggagggaccaag

SEQ ID NO: 3136 - DNA, 75 bp, Artificial Sequence
  Description of Artificial Sequence: Synthetic oligonucleotide
  modified_base (40)..(40): a, c, t or g
cctgaagatattgcaacatattactgtcagcagbhcgatnhcywccctcctmtcacttttggcggagggaccaag

SEQ ID NO: 3137 - DNA, 75 bp, Artificial Sequence
  Description of Artificial Sequence: Synthetic oligonucleotide
  modified_base (40)..(40): a, c, t or g
cctgaagatattgcaacatattactgtcagcagbhcgatnhcywccctcctwggacttttggcggagggaccaag

SEQ ID NO: 3138 - DNA, 75 bp, Artificial Sequence
  Description of Artificial Sequence: Synthetic oligonucleotide
  modified_base (37)..(37): a, c, t or g
  modified_base (40)..(40): a, c, t or g
cctgaagatattgcaacatattactgtcagcagtacnhcnhcywccctccttwcacttttggcggagggaccaag

SEQ ID NO: 3139 - DNA, 75 bp, Artificial Sequence
  Description of Artificial Sequence: Synthetic oligonucleotide
  modified_base (37)..(37): a, c, t or g
  modified_base (40)..(40): a, c, t or g
cctgaagatattgcaacatattactgtcagcagtacnhcnhcywccctcctmtcacttttggcggagggaccaag

SEQ ID NO: 3140 - DNA, 75 bp, Artificial Sequence
  Description of Artificial Sequence: Synthetic oligonucleotide
  modified_base (37)..(37): a, c, t or g
  modified_base (40)..(40): a, c, t or g
cctgaagatattgcaacatattactgtcagcagtacnhcnhcywccctcctwggacttttggcggagggaccaag

SEQ ID NO: 3141 - DNA, 75 bp, Artificial Sequence
  Description of Artificial Sequence: Synthetic oligonucleotide
  modified_base (35)..(35): a, c, t or g
  modified_base (40)..(40): a, c, t or g
cctgaagattttgcaacttactactgtcagcaavnabhcnhcactcctccttwcacttttggcggagggaccaag

SEQ ID NO: 3142 - DNA, 75 bp, Artificial Sequence
  Description of Artificial Sequence: Synthetic oligonucleotide
  modified_base (35)..(35): a, c, t or g
  modified_base (40)..(40): a, c, t or g
cctgaagattttgcaacttactactgtcagcaavnabhcnhcactcctcctmtcacttttggcggagggaccaag

SEQ ID NO: 3143 - DNA, 75 bp, Artificial Sequence
  Description of Artificial Sequence: Synthetic oligonucleotide
  modified_base (35)..(35): a, c, t or g
  modified_base (40)..(40): a, c, t or g
cctgaagattttgcaacttactactgtcagcaavnabhcnhcactcctcctwggacttttggcggagggaccaag

SEQ ID NO: 3144 - DNA, 75 bp, Artificial Sequence
  Description of Artificial Sequence: Synthetic oligonucleotide
  modified_base (35)..(35): a, c, t or g
cctgaagattttgcaacttactactgtcagcaavnabhcagtbhccctccttwcacttttggcggagggaccaag

SEQ ID NO: 3145 - DNA, 75 bp, Artificial Sequence
  Description of Artificial Sequence: Synthetic oligonucleotide
  modified_base (35)..(35): a, c, t or g
cctgaagattttgcaacttactactgtcagcaavnabhcagtbhccctcctmtcacttttggcggagggaccaag

SEQ ID NO: 3146 - DNA, 75 bp, Artificial Sequence
  Description of Artificial Sequence: Synthetic oligonucleotide
  modified_base (35)..(35): a, c, t or g
cctgaagattttgcaacttactactgtcagcaavnabhcagtbhccctcctwggacttttggcggagggaccaag

SEQ ID NO: 3147 - DNA, 75 bp, Artificial Sequence
  Description of Artificial Sequence: Synthetic oligonucleotide
  modified_base (35)..(35): a, c, t or g
  modified_base (40)..(40): a, c, t or g
cctgaagattttgcaacttactactgtcagcaavnatacnhcbhccctccttwcacttttggcggagggaccaag

SEQ ID NO: 3148 - DNA, 75 bp, Artificial Sequence
  Description of Artificial Sequence: Synthetic oligonucleotide
  modified_base (35)..(35): a, c, t or g
  modified_base (40)..(40): a, c, t or g
cctgaagattttgcaacttactactgtcagcaavnatacnhcbhccctcctmtcacttttggcggagggaccaag

SEQ ID NO: 3149 - DNA, 75 bp, Artificial Sequence
  Description of Artificial Sequence: Synthetic oligonucleotide
  modified_base (35)..(35): a, c, t or g
  modified_base (40)..(40): a, c, t or g
cctgaagattttgcaacttactactgtcagcaavnatacnhcbhccctcctwggacttttggcggagggaccaag

SEQ ID NO: 3150 - DNA, 75 bp, Artificial Sequence
  Description of Artificial Sequence: Synthetic oligonucleotide
  modified_base (40)..(40): a, c, t or g
cctgaagattttgcaacttactactgtcagcaaagcbhcnhcbhccctccttwcacttttggcggagggaccaag

SEQ ID NO: 3151 - DNA, 75 bp, Artificial Sequence
  Description of Artificial Sequence: Synthetic oligonucleotide
  modified_base (40)..(40): a, c, t or g
cctgaagattttgcaacttactactgtcagcaaagcbhcnhcbhccctcctmtcacttttggcggagggaccaag

SEQ ID NO: 3152 - DNA, 75 bp, Artificial Sequence
  Description of Artificial Sequence: Synthetic oligonucleotide
  modified_base (40)..(40): a, c, t or g
cctgaagattttgcaacttactactgtcagcaaagcbhcnhcbhccctcctwggacttttggcggagggaccaag

SEQ ID NO: 3153 - DNA, 75 bp, Artificial Sequence
  Description of Artificial Sequence: Synthetic oligonucleotide
  modified_base (35)..(35): a, c, t or g
  modified_base (38)..(38): a, c, t or g
gctgaggatgttggggtttattactgcatgcagvnamnasrmactcctccttwcacttttggcggagggaccaag

SEQ ID NO: 3154 - DNA, 75 bp, Artificial Sequence
  Description of Artificial Sequence: Synthetic oligonucleotide
  modified_base (35)..(35): a, c, t or g
  modified_base (38)..(38): a, c, t or g
gctgaggatgttggggtttattactgcatgcagvnamnasrmactcctcctmtcacttttggcggagggaccaag

SEQ ID NO: 3155 - DNA, 75 bp, Artificial Sequence
  Description of Artificial Sequence: Synthetic oligonucleotide
  modified_base (35)..(35): a, c, t or g
  modified_base (38)..(38): a, c, t or g
gctgaggatgttggggtttattactgcatgcagvnamnasrmactcctcctwggacttttggcggagggaccaag

SEQ ID NO: 3156 - DNA, 75 bp, Artificial Sequence
  Description of Artificial Sequence: Synthetic oligonucleotide
  modified_base (35)..(35): a, c, t or g
  modified_base (38)..(38): a, c, t or g
gctgaggatgttggggtttattactgcatgcagvnamnacagvbccctccttwcacttttggcggagggaccaag

SEQ ID NO: 3157 - DNA, 75 bp, Artificial Sequence
  Description of Artificial Sequence: Synthetic oligonucleotide
  modified_base (35)..(35): a, c, t or g
  modified_base (38)..(38): a, c, t or g
gctgaggatgttggggtttattactgcatgcagvnamnacagvbccctcctmtcacttttggcggagggaccaag

SEQ ID NO: 3158 - DNA, 75 bp, Artificial Sequence
  Description of Artificial Sequence: Synthetic oligonucleotide
  modified_base (35)..(35): a, c, t or g
  modified_base (38)..(38): a, c, t or g
gctgaggatgttggggtttattactgcatgcagvnamnacagvbccctcctwggacttttggcggagggaccaag

SEQ ID NO: 3159 - DNA, 75 bp, Artificial Sequence
  Description of Artificial Sequence: Synthetic oligonucleotide
  modified_base (35)..(35): a, c, t or g
gctgaggatgttggggtttattactgcatgcagvnactcsrmvbccctccttwcacttttggcggagggaccaag

SEQ ID NO: 3160 - DNA, 75 bp, Artificial Sequence
  Description of Artificial Sequence: Synthetic oligonucleotide
  modified_base (35)..(35): a, c, t or g
gctgaggatgttggggtttattactgcatgcagvnactcsrmvbccctcctmtcacttttggcggagggaccaag

SEQ ID NO: 3161 - DNA, 75 bp, Artificial Sequence
  Description of Artificial Sequence: Synthetic oligonucleotide
  modified_base (35)..(35): a, c, t or g
gctgaggatgttggggtttattactgcatgcagvnactcsrmvbccctcctwggacttttggcggagggaccaag

SEQ ID NO: 3162 - DNA, 75 bp, Artificial Sequence
  Description of Artificial Sequence: Synthetic oligonucleotide
  modified_base (38)..(38): a, c, t or g
gctgaggatgttggggtttattactgcatgcaggcamnasrmvbccctccttwcacttttggcggagggaccaag

SEQ ID NO: 3163 - DNA, 75 bp, Artificial Sequence
  Description of Artificial Sequence: Synthetic oligonucleotide
  modified_base (38)..(38): a, c, t or g
gctgaggatgttggggtttattactgcatgcaggcamnasrmvbccctcctmtcacttttggcggagggaccaag

SEQ ID NO: 3164 - DNA, 75 bp, Artificial Sequence
  Description of Artificial Sequence: Synthetic oligonucleotide
  modified_base (38)..(38): a, c, t or g
gctgaggatgttggggtttattactgcatgcaggcamnasrmvbccctcctwggacttttggcggagggaccaag

SEQ ID NO: 3165 - DNA, 75 bp, Artificial Sequence
  Description of Artificial Sequence: Synthetic oligonucleotide
  modified_base (37)..(37): a, c, t or g
  modified_base (40)..(40): a, c, t or g
cctgaagattttgcagtttattactgtcagcagbhcnhcnhctggcctccttwcacttttggcggagggaccaag

SEQ ID NO: 3166 - DNA, 75 bp, Artificial Sequence
  Description of Artificial Sequence: Synthetic oligonucleotide
  modified_base (37)..(37): a, c, t or g
  modified_base (40)..(40): a, c, t or g
cctgaagattttgcagtttattactgtcagcagbhcnhcnhctggcctcctmtcacttttggcggagggaccaag

SEQ ID NO: 3167 - DNA, 75 bp, Artificial Sequence
  Description of Artificial Sequence: Synthetic oligonucleotide
  modified_base (37)..(37): a, c, t or g
  modified_base (40)..(40): a, c, t or g
cctgaagattttgcagtttattactgtcagcagbhcnhcnhctggcctcctwggacttttggcggagggaccaag

SEQ ID NO: 3168 - DNA, 75 bp, Artificial Sequence
  Description of Artificial Sequence: Synthetic oligonucleotide
  modified_base (37)..(37): a, c, t or g
cctgaagattttgcagtttattactgtcagcagbhcnhcaatywccctccttwcacttttggcggagggaccaag

SEQ ID NO: 3169 - DNA, 75 bp, Artificial Sequence
  Description of Artificial Sequence: Synthetic oligonucleotide
  modified_base (37)..(37): a, c, t or g
cctgaagattttgcagtttattactgtcagcagbhcnhcaatywccctcctmtcacttttggcggagggaccaag

SEQ ID NO: 3170 - DNA, 75 bp, Artificial Sequence
  Description of Artificial Sequence: Synthetic oligonucleotide
  modified_base (37)..(37): a, c, t or g
cctgaagattttgcagtttattactgtcagcagbhcnhcaatywccctcctwggacttttggcggagggaccaag

SEQ ID NO: 3171 - DNA, 75 bp, Artificial Sequence
  Description of Artificial Sequence: Synthetic oligonucleotide
  modified_base (40)..(40): a, c, t or g
cctgaagattttgcagtttattactgtcagcagbhcagtnhcywccctccttwcacttttggcggagggaccaag

SEQ ID NO: 3172 - DNA, 75 bp, Artificial Sequence
  Description of Artificial Sequence: Synthetic oligonucleotide
  modified_base (40)..(40): a, c, t or g
cctgaagattttgcagtttattactgtcagcagbhcagtnhcywccctcctmtcacttttggcggagggaccaag

SEQ ID NO: 3173 - DNA, 75 bp, Artificial Sequence
  Description of Artificial Sequence: Synthetic oligonucleotide
  modified_base (40)..(40): a, c, t or g
cctgaagattttgcagtttattactgtcagcagbhcagtnhcywccctcctwggacttttggcggagggaccaag

SEQ ID NO: 3174 - DNA, 75 bp, Artificial Sequence
  Description of Artificial Sequence: Synthetic oligonucleotide
  modified_base (37)..(37): a, c, t or g
  modified_base (40)..(40): a, c, t or g
cctgaagattttgcagtttattactgtcagcagaganhcnhcywccctccttwcacttttggcggagggaccaag

SEQ ID NO: 3175 - DNA, 75 bp, Artificial Sequence
  Description of Artificial Sequence: Synthetic oligonucleotide
  modified_base (37)..(37): a, c, t or g
  modified_base (40)..(40): a, c, t or g
cctgaagattttgcagtttattactgtcagcagaganhcnhcywccctcctmtcacttttggcggagggaccaag

SEQ ID NO: 3176 - DNA, 75 bp, Artificial Sequence
  Description of Artificial Sequence: Synthetic oligonucleotide
  modified_base (37)..(37): a, c, t or g
  modified_base (40)..(40): a, c, t or g
cctgaagattttgcagtttattactgtcagcagaganhcnhcywccctcctwggacttttggcggagggaccaag

SEQ ID NO: 3177 - DNA, 78 bp, Artificial Sequence
  Description of Artificial Sequence: Synthetic oligonucleotide
  modified_base (40)..(40): a, c, t or g
  modified_base (43)..(43): a, c, t or g
cagtctgaagattttgcagtttattactgtcagcagbhcnhcnhctggcctccttwcacttttggcggagggaccaag

SEQ ID NO: 3178 - DNA, 78 bp, Artificial Sequence
  Description of Artificial Sequence: Synthetic oligonucleotide
  modified_base (40)..(40): a, c, t or g
  modified_base (43)..(43): a, c, t or g
cagtctgaagattttgcagtttattactgtcagcagbhcnhcnhctggcctcctmtcacttttggcggagggaccaag

SEQ ID NO: 3179 - DNA, 78 bp, Artificial Sequence
  Description of Artificial Sequence: Synthetic oligonucleotide
  modified_base (40)..(40): a, c, t or g
  modified_base (43)..(43): a, c, t or g
cagtctgaagattttgcagtttattactgtcagcagbhcnhcnhctggcctcctwggacttttggcggagggaccaag

SEQ ID NO: 3180 - DNA, 78 bp, Artificial Sequence
  Description of Artificial Sequence: Synthetic oligonucleotide
  modified_base (40)..(40): a, c, t or g
cagtctgaagattttgcagtttattactgtcagcagbhcnhcaatywccctccttwcacttttggcggagggaccaag

SEQ ID NO: 3181 - DNA, 78 bp, Artificial Sequence
  Description of Artificial Sequence: Synthetic oligonucleotide
  modified_base (40)..(40): a, c, t or g
cagtctgaagattttgcagtttattactgtcagcagbhcnhcaatywccctcctmtcacttttggcggagggaccaag

SEQ ID NO: 3182 - DNA, 78 bp, Artificial Sequence
  Description of Artificial Sequence: Synthetic oligonucleotide
  modified_base (40)..(40): a, c, t or g
cagtctgaagattttgcagtttattactgtcagcagbhcnhcaatywccctcctwggacttttggcggagggaccaag

SEQ ID NO: 3183 - DNA, 78 bp, Artificial Sequence
  Description of Artificial Sequence: Synthetic oligonucleotide
  modified_base (43)..(43): a, c, t or g
cagtctgaagattttgcagtttattactgtcagcagbhcaatnhcywccctccttwcacttttggcggagggaccaag

SEQ ID NO: 3184 - DNA, 78 bp, Artificial Sequence
  Description of Artificial Sequence: Synthetic oligonucleotide
  modified_base (43)..(43): a, c, t or g
cagtctgaagattttgcagtttattactgtcagcagbhcaatnhcywccctcctmtcacttttggcggagggaccaag

SEQ ID NO: 3185 - DNA, 78 bp, Artificial Sequence
  Description of Artificial Sequence: Synthetic oligonucleotide
  modified_base (43)..(43): a, c, t or g
cagtctgaagattttgcagtttattactgtcagcagbhcaatnhcywccctcctwggacttttggcggagggaccaag

SEQ ID NO: 3186 - DNA, 78 bp, Artificial Sequence
  Description of Artificial Sequence: Synthetic oligonucleotide
  modified_base (40)..(40): a, c, t or g
  modified_base (43)..(43): a, c, t or g
cagtctgaagattttgcagtttattactgtcagcagtacnhcnhcywccctccttwcacttttggcggagggaccaag

SEQ ID NO: 3187 - DNA, 78 bp, Artificial Sequence
  Description of Artificial Sequence: Synthetic oligonucleotide
  modified_base (40)..(40): a, c, t or g
  modified_base (43)..(43): a, c, t or g
cagtctgaagattttgcagtttattactgtcagcagtacnhcnhcywccctcctmtcacttttggcggagggaccaag

SEQ ID NO: 3188 - DNA, 78 bp, Artificial Sequence
  Description of Artificial Sequence: Synthetic oligonucleotide
  modified_base (40)..(40): a, c, t or g
  modified_base (43)..(43): a, c, t or g
cagtctgaagattttgcagtttattactgtcagcagtacnhcnhcywccctcctwggacttttggcggagggaccaag

SEQ ID NO: 3189 - DNA, 75 bp, Artificial Sequence
  Description of Artificial Sequence: Synthetic oligonucleotide
  modified_base (41)..(41): a, c, t or g
cctgaagattttgcagtgtattactgtcagcagbhcbhcvncagtcctccttwcacttttggcggagggaccaag

SEQ ID NO: 3190 - DNA, 75 bp, Artificial Sequence
  Description of Artificial Sequence: Synthetic oligonucleotide
  modified_base (41)..(41): a, c, t or g
cctgaagattttgcagtgtattactgtcagcagbhcbhcvncagtcctcctmtcacttttggcggagggaccaag

SEQ ID NO: 3191 - DNA, 75 bp, Artificial Sequence
  Description of Artificial Sequence: Synthetic oligonucleotide
  modified_base (41)..(41): a, c, t or g
cctgaagattttgcagtgtattactgtcagcagbhcbhcvncagtcctcctwggacttttggcggagggaccaag

SEQ ID NO: 3192 - DNA, 75 bp, Artificial Sequence
  Description of Artificial Sequence: Synthetic oligonucleotide
cctgaagattttgcagtgtattactgtcagcagbhcbhcagtbhccctccttwcacttttggcggagggaccaag

SEQ ID NO: 3193 - DNA, 75 bp, Artificial Sequence
  Description of Artificial Sequence: Synthetic oligonucleotide
cctgaagattttgcagtgtattactgtcagcagbhcbhcagtbhccctcctmtcacttttggcggagggaccaag

SEQ ID NO: 3194 - DNA, 75 bp, Artificial Sequence
  Description of Artificial Sequence: Synthetic oligonucleotide
cctgaagattttgcagtgtattactgtcagcagbhcbhcagtbhccctcctwggacttttggcggagggaccaag

SEQ ID NO: 3195 - DNA, 75 bp, Artificial Sequence
  Description of Artificial Sequence: Synthetic oligonucleotide
  modified_base (41)..(41): a, c, t or g
cctgaagattttgcagtgtattactgtcagcagbhcggavncbhccctccttwcacttttggcggagggaccaag

SEQ ID NO: 3196 - DNA, 75 bp, Artificial Sequence
  Description of Artificial Sequence: Synthetic oligonucleotide
  modified_base (41)..(41): a, c, t or g
cctgaagattttgcagtgtattactgtcagcagbhcggavncbhccctcctmtcacttttggcggagggaccaag

SEQ ID NO: 3197 - DNA, 75 bp, Artificial Sequence
  Description of Artificial Sequence: Synthetic oligonucleotide
  modified_base (41)..(41): a, c, t or g
cctgaagattttgcagtgtattactgtcagcagbhcggavncbhccctcctwggacttttggcggagggaccaag

SEQ ID NO: 3198 - DNA, 75 bp, Artificial Sequence
  Description of Artificial Sequence: Synthetic oligonucleotide
  modified_base (41)..(41): a, c, t or g
cctgaagattttgcagtgtattactgtcagcagtacbhcvncbhccctccttwcacttttggcggagggaccaag

SEQ ID NO: 3199 - DNA, 75 bp, Artificial Sequence
  Description of Artificial Sequence: Synthetic oligonucleotide
  modified_base (41)..(41): a, c, t or g
cctgaagattttgcagtgtattactgtcagcagtacbhcvncbhccctcctmtcacttttggcggagggaccaag

SEQ ID NO: 3200 - DNA, 75 bp, Artificial Sequence
  Description of Artificial Sequence: Synthetic oligonucleotide
  modified_base (41)..(41): a, c, t or g
cctgaagattttgcagtgtattactgtcagcagtacbhcvncbhccctcctwggacttttggcggagggaccaag

SEQ ID NO: 3201 - DNA, 75 bp, Artificial Sequence
  Description of Artificial Sequence: Synthetic oligonucleotide
  modified_base (40)..(40): a, c, t or g
gctgaagatgtggcagtttattactgtcagcagbhcbhcnhcactcctccttwcacttttggcggagggaccaag

SEQ ID NO: 3202 - DNA, 75 bp, Artificial Sequence
  Description of Artificial Sequence: Synthetic oligonucleotide
  modified_base (40)..(40): a, c, t or g
gctgaagatgtggcagtttattactgtcagcagbhcbhcnhcactcctcctmtcacttttggcggagggaccaag

SEQ ID NO: 3203 - DNA, 75 bp, Artificial Sequence
  Description of Artificial Sequence: Synthetic oligonucleotide
  modified_base (40)..(40): a, c, t or g
gctgaagatgtggcagtttattactgtcagcagbhcbhcnhcactcctcctwggacttttggcggagggaccaag

SEQ ID NO: 3204 - DNA, 75 bp, Artificial Sequence
  Description of Artificial Sequence: Synthetic oligonucleotide
gctgaagatgtggcagtttattactgtcagcagbhcbhcagtbhccctccttwcacttttggcggagggaccaag

SEQ ID NO: 3205 - DNA, 75 bp, Artificial Sequence
  Description of Artificial Sequence: Synthetic oligonucleotide
gctgaagatgtggcagtttattactgtcagcagbhcbhcagtbhccctcctmtcacttttggcggagggaccaag

SEQ ID NO: 3206 - DNA, 75 bp, Artificial Sequence
  Description of Artificial Sequence: Synthetic oligonucleotide
gctgaagatgtggcagtttattactgtcagcagbhcbhcagtbhccctcctwggacttttggcggagggaccaag

SEQ ID NO: 3207 - DNA, 75 bp, Artificial Sequence
  Description of Artificial Sequence: Synthetic oligonucleotide
  modified_base (40)..(40): a, c, t or g
gctgaagatgtggcagtttattactgtcagcagbhctacnhcbhccctccttwcacttttggcggagggaccaag

SEQ ID NO: 3208 - DNA, 75 bp, Artificial Sequence
  Description of Artificial Sequence: Synthetic oligonucleotide
  modified_base (40)..(40): a, c, t or g
gctgaagatgtggcagtttattactgtcagcagbhctacnhcbhccctcctmtcacttttggcggagggaccaag

SEQ ID NO: 3209 - DNA, 75 bp, Artificial Sequence
  Description of Artificial Sequence: Synthetic oligonucleotide
  modified_base (40)..(40): a, c, t or g
gctgaagatgtggcagtttattactgtcagcagbhctacnhcbhccctcctwggacttttggcggagggaccaag

SEQ ID NO: 3210 - DNA, 75 bp, Artificial Sequence
  Description of Artificial Sequence: Synthetic oligonucleotide
  modified_base (40)..(40): a, c, t or g
gctgaagatgtggcagtttattactgtcagcagtacbhcnhcbhccctccttwcacttttggcggagggaccaag

SEQ ID NO: 3211 - DNA, 75 bp, Artificial Sequence
  Description of Artificial Sequence: Synthetic oligonucleotide
  modified_base (40)..(40): a, c, t or g
gctgaagatgtggcagtttattactgtcagcagtacbhcnhcbhccctcctmtcacttttggcggagggaccaag

SEQ ID NO: 3212 - DNA, 75 bp, Artificial Sequence
  Description of Artificial Sequence: Synthetic oligonucleotide
  modified_base (40)..(40): a, c, t or g
gctgaagatgtggcagtttattactgtcagcagtacbhcnhcbhccctcctwggacttttggcggagggaccaag

SEQ ID NO: 3213 - DNA, 30 bp, Artificial Sequence
  Description of Artificial Sequence: Synthetic oligonucleotide
swmswmtacaatagttacyctccttwcact

SEQ ID NO: 3214 - DNA, 30 bp, Artificial Sequence
  Description of Artificial Sequence: Synthetic oligonucleotide
cagcagbhcvrmagttacyctccttwcact

SEQ ID NO: 3215 - DNA, 30 bp, Artificial Sequence
  Description of Artificial Sequence: Synthetic oligonucleotide
cagcagbhcaatmbctacyctccttwcact

SEQ ID NO: 3216 - DNA, 30 bp, Artificial Sequence
  Description of Artificial Sequence: Synthetic oligonucleotide
cagcagbhcaatagtywcyctccttwcact

SEQ ID NO: 3217 - DNA, 30 bp, Artificial Sequence
  Description of Artificial Sequence: Synthetic oligonucleotide
cagcagtacvrmmbctacyctccttwcact

SEQ ID NO: 3218 - DNA, 30 bp, Artificial Sequence
  Description of Artificial Sequence: Synthetic oligonucleotide
cagcagtacvrmagtywcyctccttwcact

SEQ ID NO: 3219 - DNA, 30 bp, Artificial Sequence
  Description of Artificial Sequence: Synthetic oligonucleotide
cagcagtacaatmbcywcyctccttwcact

SEQ ID NO: 3220 - DNA, 30 bp, Artificial Sequence
  Description of Artificial Sequence: Synthetic oligonucleotide
swmcagbhcaatagttacyctccttwcact

SEQ ID NO: 3221 - DNA, 30 bp, Artificial Sequence
  Description of Artificial Sequence: Synthetic oligonucleotide
swmcagtacvrmagttacyctccttwcact

SEQ ID NO: 3222 - DNA, 30 bp, Artificial Sequence
  Description of Artificial Sequence: Synthetic oligonucleotide
swmcagtacaatmbctacyctccttwcact

SEQ ID NO: 3223 - DNA, 30 bp, Artificial Sequence
  Description of Artificial Sequence: Synthetic oligonucleotide
swmcagtacaatagtywcyctccttwcact

SEQ ID NO: 3224 - DNA, 30 bp, Artificial Sequence
  Description of Artificial Sequence: Synthetic oligonucleotide
cagswmbhcaatagttacyctccttwcact

SEQ ID NO: 3225 - DNA, 30 bp, Artificial Sequence
  Description of Artificial Sequence: Synthetic oligonucleotide
cagswmtacvrmagttacyctccttwcact

SEQ ID NO: 3226 - DNA, 30 bp, Artificial Sequence
  Description of Artificial Sequence: Synthetic oligonucleotide
cagswmtacaatmbctacyctccttwcact

SEQ ID NO: 3227 - DNA, 30 bp, Artificial Sequence
  Description of Artificial Sequence: Synthetic oligonucleotide
cagswmtacaatagtywcyctccttwcact

SEQ ID NO: 3228 - DNA, 30 bp, Artificial Sequence
  Description of Artificial Sequence: Synthetic oligonucleotide
swmswmtacaatagttacyctcctmtcact

SEQ ID NO: 3229 - DNA, 30 bp, Artificial Sequence
  Description of Artificial Sequence: Synthetic oligonucleotide
cagcagbhcvrmagttacyctcctmtcact

SEQ ID NO: 3230 - DNA, 30 bp, Artificial Sequence
  Description of Artificial Sequence: Synthetic oligonucleotide
cagcagbhcaatmbctacyctcctmtcact

SEQ ID NO: 3231 - DNA, 30 bp, Artificial Sequence
  Description of Artificial Sequence: Synthetic oligonucleotide
cagcagbhcaatagtywcyctcctmtcact

SEQ ID NO: 3232 - DNA, 30 bp, Artificial Sequence
  Description of Artificial Sequence: Synthetic oligonucleotide
cagcagtacvrmmbctacyctcctmtcact

SEQ ID NO: 3233 - DNA, 30 bp, Artificial Sequence
  Description of Artificial Sequence: Synthetic oligonucleotide
cagcagtacvrmagtywcyctcctmtcact

SEQ ID NO: 3234 - DNA, 30 bp, Artificial Sequence
  Description of Artificial Sequence: Synthetic oligonucleotide
cagcagtacaatmbcywcyctcctmtcact

SEQ ID NO: 3235 - DNA, 30 bp, Artificial Sequence
  Description of Artificial Sequence: Synthetic oligonucleotide
swmcagbhcaatagttacyctcctmtcact

SEQ ID NO: 3236 - DNA, 30 bp, Artificial Sequence
  Description of Artificial Sequence: Synthetic oligonucleotide
swmcagtacvrmagttacyctcctmtcact

SEQ ID NO: 3237 - DNA, 30 bp, Artificial Sequence
  Description of Artificial Sequence: Synthetic oligonucleotide
swmcagtacaatmbctacyctcctmtcact

SEQ ID NO: 3238 - DNA, 30 bp, Artificial Sequence
  Description of Artificial Sequence: Synthetic oligonucleotide
swmcagtacaatagtywcyctcctmtcact

SEQ ID NO: 3239 - DNA, 30 bp, Artificial Sequence
  Description of Artificial Sequence: Synthetic oligonucleotide
cagswmbhcaatagttacyctcctmtcact

SEQ ID NO: 3240 - DNA, 30 bp, Artificial Sequence
  Description of Artificial Sequence: Synthetic oligonucleotide
cagswmtacvrmagttacyctcctmtcact

SEQ ID NO: 3241 - DNA, 30 bp, Artificial Sequence
  Description of Artificial Sequence: Synthetic oligonucleotide
cagswmtacaatmbctacyctcctmtcact

SEQ ID NO: 3242 - DNA, 30 bp, Artificial Sequence
  Description of Artificial Sequence: Synthetic oligonucleotide
cagswmtacaatagtywcyctcctmtcact

SEQ ID NO: 3243 - DNA, 30 bp, Artificial Sequence
  Description of Artificial Sequence: Synthetic oligonucleotide
swmswmtacaatagttacyctcctwggact

SEQ ID NO: 3244 - DNA, 30 bp, Artificial Sequence
  Description of Artificial Sequence: Synthetic oligonucleotide
cagcagbhcvrmagttacyctcctwggact

SEQ ID NO: 3245 - DNA, 30 bp, Artificial Sequence
  Description of Artificial Sequence: Synthetic oligonucleotide
cagcagbhcaatmbctacyctcctwggact

SEQ ID NO: 3246 - DNA, 30 bp, Artificial Sequence
  Description of Artificial Sequence: Synthetic oligonucleotide
cagcagbhcaatagtywcyctcctwggact

SEQ ID NO: 3247 - DNA, 30 bp, Artificial Sequence
  Description of Artificial Sequence: Synthetic oligonucleotide
cagcagtacvrmmbctacyctcctwggact

SEQ ID NO: 3248 - DNA, 30 bp, Artificial Sequence
  Description of Artificial Sequence: Synthetic oligonucleotide
cagcagtacvrmagtywcyctcctwggact

SEQ ID NO: 3249 - DNA, 30 bp, Artificial Sequence
  Description of Artificial Sequence: Synthetic oligonucleotide
cagcagtacaatmbcywcyctcctwggact

SEQ ID NO: 3250 - DNA, 30 bp, Artificial Sequence
  Description of Artificial Sequence: Synthetic oligonucleotide
swmcagbhcaatagttacyctcctwggact

SEQ ID NO: 3251 - DNA, 30 bp, Artificial Sequence
  Description of Artificial Sequence: Synthetic oligonucleotide
swmcagtacvrmagttacyctcctwggact

SEQ ID NO: 3252 - DNA, 30 bp, Artificial Sequence
  Description of Artificial Sequence: Synthetic oligonucleotide
swmcagtacaatmbctacyctcctwggact

SEQ ID NO: 3253 - DNA, 30 bp, Artificial Sequence
  Description of Artificial Sequence: Synthetic oligonucleotide
swmcagtacaatagtywcyctcctwggact

SEQ ID NO: 3254 - DNA, 30 bp, Artificial Sequence
  Description of Artificial Sequence: Synthetic oligonucleotide
cagswmbhcaatagttacyctcctwggact

SEQ ID NO: 3255 - DNA, 30 bp, Artificial Sequence
  Description of Artificial Sequence: Synthetic oligonucleotide
cagswmtacvrmagttacyctcctwggact

SEQ ID NO: 3256 - DNA, 30 bp, Artificial Sequence
  Description of Artificial Sequence: Synthetic oligonucleotide
cagswmtacaatmbctacyctcctwggact

SEQ ID NO: 3257 - DNA, 30 bp, Artificial Sequence
  Description of Artificial Sequence: Synthetic oligonucleotide
cagswmtacaatagtywcyctcctwggact

SEQ ID NO: 3258 - DNA, 30 bp, Artificial Sequence
  Description of Artificial Sequence: Synthetic oligonucleotide
swmswmgcaaatagtttccctccttwcact

SEQ ID NO: 3259 - DNA, 30 bp, Artificial Sequence
  Description of Artificial Sequence: Synthetic oligonucleotide
  modified_base (8)..(8): a, c, t or g
  modified_base (10)..(10): a, c, t or g
cagcagrnanhcagtttccctccttwcact

SEQ ID NO: 3260 - DNA, 30 bp, Artificial Sequence
  Description of Artificial Sequence: Synthetic oligonucleotide
  modified_base (8)..(8): a, c, t or g
  modified_base (13)..(13): a, c, t or g
cagcagrnaaatnhcttccctccttwcact

SEQ ID NO: 3261 - DNA, 30 bp, Artificial Sequence
  Description of Artificial Sequence: Synthetic oligonucleotide
  modified_base (8)..(8): a, c, t or g
cagcagrnaaatagtywccctccttwcact

SEQ ID NO: 3262 - DNA, 30 bp, Artificial Sequence
  Description of Artificial Sequence: Synthetic oligonucleotide
  modified_base (10)..(10): a, c, t or g
  modified_base (13)..(13): a, c, t or g
cagcaggcanhcnhcttccctccttwcact

SEQ ID NO: 3263 - DNA, 30 bp, Artificial Sequence
  Description of Artificial Sequence: Synthetic oligonucleotide
  modified_base (10)..(10): a, c, t or g
cagcaggcanhcagtywccctccttwcact

SEQ ID NO: 3264 - DNA, 30 bp, Artificial Sequence
  Description of Artificial Sequence: Synthetic oligonucleotide
  modified_base (13)..(13): a, c, t or g
cagcaggcaaatnhcywccctccttwcact

SEQ ID NO: 3265 - DNA, 30 bp, Artificial Sequence
  Description of Artificial Sequence: Synthetic oligonucleotide
  modified_base (8)..(8): a, c, t or g
swmcagrnaaatagtttccctccttwcact

SEQ ID NO: 3266 - DNA, 30 bp, Artificial Sequence
  Description of Artificial Sequence: Synthetic oligonucleotide
  modified_base (10)..(10): a, c, t or g
swmcaggcanhcagtttccctccttwcact

SEQ ID NO: 3267 - DNA, 30 bp, Artificial Sequence
  Description of Artificial Sequence: Synthetic oligonucleotide
  modified_base (13)..(13): a, c, t or g
swmcaggcaaatnhcttccctccttwcact

SEQ ID NO: 3268 - DNA, 30 bp, Artificial Sequence
  Description of Artificial Sequence: Synthetic oligonucleotide
swmcaggcaaatagtywccctccttwcact

SEQ ID NO: 3269 - DNA, 30 bp, Artificial Sequence
  Description of Artificial Sequence: Synthetic oligonucleotide
  modified_base (8)..(8): a, c, t or g
cagswmrnaaatagtttccctccttwcact

SEQ ID NO: 3270 - DNA, 30 bp, Artificial Sequence
  Description of Artificial Sequence: Synthetic oligonucleotide
  modified_base (10)..(10): a, c, t or g
cagswmgcanhcagtttccctccttwcact

SEQ ID NO: 3271 - DNA, 30 bp, Artificial Sequence
  Description of Artificial Sequence: Synthetic oligonucleotide
  modified_base (13)..(13): a, c, t or g
cagswmgcaaatnhcttccctccttwcact

SEQ ID NO: 3272 - DNA, 30 bp, Artificial Sequence
  Description of Artificial Sequence: Synthetic oligonucleotide
cagswmgcaaatagtywccctccttwcact

SEQ ID NO: 3273 - DNA, 30 bp, Artificial Sequence
  Description of Artificial Sequence: Synthetic oligonucleotide
swmswmgcaaatagtttccctcctmtcact

SEQ ID NO: 3274 - DNA, 30 bp, Artificial Sequence
  Description of Artificial Sequence: Synthetic oligonucleotide
  modified_base (8)..(8): a, c, t or g
  modified_base (10)..(10): a, c, t or g
cagcagrnanhcagtttccctcctmtcact

SEQ ID NO: 3275 - DNA, 30 bp, Artificial Sequence
  Description of Artificial Sequence: Synthetic oligonucleotide
  modified_base (8)..(8): a, c, t or g
  modified_base (13)..(13): a, c, t or g
cagcagrnaaatnhcttccctcctmtcact

SEQ ID NO: 3276 - DNA, 30 bp, Artificial Sequence
  Description of Artificial Sequence: Synthetic oligonucleotide
  modified_base (8)..(8): a, c, t or g
cagcagrnaaatagtywccctcctmtcact

SEQ ID NO: 3277 - DNA, 30 bp, Artificial Sequence
  Description of Artificial Sequence: Synthetic oligonucleotide
  modified_base (10)..(10): a, c, t or g
  modified_base (13)..(13): a, c, t or g
cagcaggcanhcnhcttccctcctmtcact

SEQ ID NO: 3278 - DNA, 30 bp, Artificial Sequence
  Description of Artificial Sequence: Synthetic oligonucleotide
  modified_base (10)..(10): a, c, t or g
cagcaggcanhcagtywccctcctmtcact

SEQ ID NO: 3279 - DNA, 30 bp, Artificial Sequence
  Description of Artificial Sequence: Synthetic oligonucleotide
  modified_base (13)..(13): a, c, t or g
cagcaggcaaatnhcywccctcctmtcact

SEQ ID NO: 3280 - DNA, 30 bp, Artificial Sequence
  Description of Artificial Sequence: Synthetic oligonucleotide
  modified_base (8)..(8): a, c, t or g
swmcagrnaaatagtttccctcctmtcact

SEQ ID NO: 3281 - DNA, 30 bp, Artificial Sequence
  Description of Artificial Sequence: Synthetic oligonucleotide
  modified_base (10)..(10): a, c, t or g
swmcaggcanhcagtttccctcctmtcact

SEQ ID NO: 3282 - DNA, 30 bp, Artificial Sequence
  Description of Artificial Sequence: Synthetic oligonucleotide
  modified_base (13)..(13): a, c, t or g
swmcaggcaaatnhcttccctcctmtcact

SEQ ID NO: 3283 - DNA, 30 bp, Artificial Sequence
  Description of Artificial Sequence: Synthetic oligonucleotide
swmcaggcaaatagtywccctcctmtcact

SEQ ID NO: 3284 - DNA, 30 bp, Artificial Sequence
  Description of Artificial Sequence: Synthetic oligonucleotide
  modified_base (8)..(8): a, c, t or g
cagswmrnaaatagtttccctcctmtcact

SEQ ID NO: 3285 - DNA, 30 bp, Artificial Sequence
  Description of Artificial Sequence: Synthetic oligonucleotide
  modified_base (10)..(10): a, c, t or g
cagswmgcanhcagtttccctcctmtcact

SEQ ID NO: 3286 - DNA, 30 bp, Artificial Sequence
  Description of Artificial Sequence: Synthetic oligonucleotide
  modified_base (13)..(13): a, c, t or g
cagswmgcaaatnhcttccctcctmtcact

SEQ ID NO: 3287 - DNA, 30 bp, Artificial Sequence
  Description of Artificial Sequence: Synthetic oligonucleotide
cagswmgcaaatagtywccctcctmtcact

SEQ ID NO: 3288 - DNA, 30 bp, Artificial Sequence
  Description of Artificial Sequence: Synthetic oligonucleotide
swmswmgcaaatagtttccctcctwggact

SEQ ID NO: 3289 - DNA, 30 bp, Artificial Sequence
  Description of Artificial Sequence: Synthetic oligonucleotide
  modified_base (8)..(8): a, c, t or g
  modified_base (10)..(10): a, c, t or g
cagcagrnanhcagtttccctcctwggact

SEQ ID NO: 3290 - DNA, 30 bp, Artificial Sequence
  Description of Artificial Sequence: Synthetic oligonucleotide
  modified_base (8)..(8): a, c, t or g
  modified_base (13)..(13): a, c, t or g
cagcagrnaaatnhcttccctcctwggact

SEQ ID NO: 3291 - DNA, 30 bp, Artificial Sequence
  Description of Artificial Sequence: Synthetic oligonucleotide
  modified_base (8)..(8): a, c, t or g
cagcagrnaaatagtywccctcctwggact

SEQ ID NO: 3292 - DNA, 30 bp, Artificial Sequence
  Description of Artificial Sequence: Synthetic oligonucleotide
  modified_base (10)..(10): a, c, t or g
  modified_base (13)..(13): a, c, t or g
cagcaggcanhcnhcttccctcctwggact

SEQ ID NO: 3293 - DNA, 30 bp, Artificial Sequence
  Description of Artificial Sequence: Synthetic oligonucleotide
  modified_base (10)..(10): a, c, t or g
cagcaggcanhcagtywccctcctwggact

SEQ ID NO: 3294 - DNA, 30 bp, Artificial Sequence
  Description of Artificial Sequence: Synthetic oligonucleotide
  modified_base (13)..(13): a, c, t or g
cagcaggcaaatnhcywccctcctwggact

SEQ ID NO: 3295 - DNA, 30 bp, Artificial Sequence
  Description of Artificial Sequence: Synthetic oligonucleotide
  modified_base (8)..(8): a, c, t or g
swmcagrnaaatagtttccctcctwggact

SEQ ID NO: 3296 - DNA, 30 bp, Artificial Sequence
  Description of Artificial Sequence: Synthetic oligonucleotide
  modified_base (10)..(10): a, c, t or g
swmcaggcanhcagtttccctcctwggact

SEQ ID NO: 3297 - DNA, 30 bp, Artificial Sequence
  Description of Artificial Sequence: Synthetic oligonucleotide
  modified_base (13)..(13): a, c, t or g
swmcaggcaaatnhcttccctcctwggact

SEQ ID NO: 3298 - DNA, 30 bp, Artificial Sequence
  Description of Artificial Sequence: Synthetic oligonucleotide
swmcaggcaaatagtywccctcctwggact

SEQ ID NO: 3299 - DNA, 30 bp, Artificial Sequence
  Description of Artificial Sequence: Synthetic oligonucleotide
  modified_base (8)..(8): a, c, t or g
cagswmrnaaatagtttccctcctwggact

SEQ ID NO: 3300 - DNA, 30 bp, Artificial Sequence
  Description of Artificial Sequence: Synthetic oligonucleotide
  modified_base (10)..(10): a, c, t or g
cagswmgcanhcagtttccctcctwggact

SEQ ID NO: 3301 - DNA, 30 bp, Artificial Sequence
  Description of Artificial Sequence: Synthetic oligonucleotide
  modified_base (13)..(13): a, c, t or g
cagswmgcaaatnhcttccctcctwggact

SEQ ID NO: 3302 - DNA, 30 bp, Artificial Sequence
  Description of Artificial Sequence: Synthetic oligonucleotide
cagswmgcaaatagtywccctcctwggact

SEQ ID NO: 3303 - DNA, 30 bp, Artificial Sequence
  Description of Artificial Sequence: Synthetic oligonucleotide
swmswmtacgataatctccctccttwcact

SEQ ID NO: 3304 - DNA, 30 bp, Artificial Sequence
  Description of Artificial Sequence: Synthetic oligonucleotide
  modified_base (10)..(10): a, c, t or g
cagcagbhcnhcaatctccctccttwcact

SEQ ID NO: 3305 - DNA, 30 bp, Artificial Sequence
  Description of Artificial Sequence: Synthetic oligonucleotide
  modified_base (13)..(13): a, c, t or g
cagcagbhcgatnhcctccctccttwcact

SEQ ID NO: 3306 - DNA, 30 bp, Artificial Sequence
  Description of Artificial Sequence: Synthetic oligonucleotide
cagcagbhcgataatywccctccttwcact

SEQ ID NO: 3307 - DNA, 30 bp, Artificial Sequence
  Description of Artificial Sequence: Synthetic oligonucleotide
  modified_base (10)..(10): a, c, t or g
  modified_base (13)..(13): a, c, t or g
cagcagtacnhcnhcctccctccttwcact

SEQ ID NO: 3308 - DNA, 30 bp, Artificial Sequence
  Description of Artificial Sequence: Synthetic oligonucleotide
  modified_base (10)..(10): a, c, t or g
cagcagtacnhcaatywccctccttwcact

SEQ ID NO: 3309 - DNA, 30 bp, Artificial Sequence
  Description of Artificial Sequence: Synthetic oligonucleotide
  modified_base (13)..(13): a, c, t or g
cagcagtacgatnhcywccctccttwcact

SEQ ID NO: 3310 - DNA, 30 bp, Artificial Sequence
  Description of Artificial Sequence: Synthetic oligonucleotide
swmcagbhcgataatctccctccttwcact

SEQ ID NO: 3311 - DNA, 30 bp, Artificial Sequence
  Description of Artificial Sequence: Synthetic oligonucleotide
  modified_base (10)..(10): a, c, t or g
swmcagtacnhcaatctccctccttwcact

SEQ ID NO: 3312 - DNA, 30 bp, Artificial Sequence
  Description of Artificial Sequence: Synthetic oligonucleotide
  modified_base (13)..(13): a, c, t or g
swmcagtacgatnhcctccctccttwcact

SEQ ID NO: 3313 - DNA, 30 bp, Artificial Sequence
  Description of Artificial Sequence: Synthetic oligonucleotide
swmcagtacgataatywccctccttwcact

SEQ ID NO: 3314 - DNA, 30 bp, Artificial Sequence
  Description of Artificial Sequence: Synthetic oligonucleotide
cagswmbhcgataatctccctccttwcact

SEQ ID NO: 3315 - DNA, 30 bp, Artificial Sequence
  Description of Artificial Sequence: Synthetic oligonucleotide
  modified_base (10)..(10): a, c, t or g
cagswmtacnhcaatctccctccttwcact

SEQ ID NO: 3316 - DNA, 30 bp, Artificial Sequence
  Description of Artificial Sequence: Synthetic oligonucleotide
  modified_base (13)..(13): a, c, t or g
cagswmtacgatnhcctccctccttwcact

SEQ ID NO: 3317 - DNA, 30 bp, Artificial Sequence
  Description of Artificial Sequence: Synthetic oligonucleotide
cagswmtacgataatywccctccttwcact

SEQ ID NO: 3318 - DNA, 30 bp, Artificial Sequence
  Description of Artificial Sequence: Synthetic oligonucleotide
swmswmtacgataatctccctcctmtcact

SEQ ID NO: 3319 - DNA, 30 bp, Artificial Sequence
  Description of Artificial Sequence: Synthetic oligonucleotide
  modified_base (10)..(10): a, c, t or g
cagcagbhcnhcaatctccctcctmtcact

SEQ ID NO: 3320 - DNA, 30 bp, Artificial Sequence
  Description of Artificial Sequence: Synthetic oligonucleotide
  modified_base (13)..(13): a, c, t or g
cagcagbhcgatnhcctccctcctmtcact

SEQ ID NO: 3321 - DNA, 30 bp, Artificial Sequence
  Description of Artificial Sequence: Synthetic oligonucleotide
cagcagbhcgataatywccctcctmtcact

SEQ ID NO: 3322 - DNA, 30 bp, Artificial Sequence
  Description of Artificial Sequence: Synthetic oligonucleotide
  modified_base (10)..(10): a, c, t or g
  modified_base (13)..(13): a, c, t or g
cagcagtacnhcnhcctccctcctmtcact

SEQ ID NO: 3323 - DNA, 30 bp, Artificial Sequence
  Description of Artificial Sequence: Synthetic oligonucleotide
  modified_base (10)..(10): a, c, t or g
cagcagtacnhcaatywccctcctmtcact

SEQ ID NO: 3324 - DNA, 30 bp, Artificial Sequence
  Description of Artificial Sequence: Synthetic oligonucleotide
  modified_base (13)..(13): a, c, t or g
cagcagtacgatnhcywccctcctmtcact

SEQ ID NO: 3325 - DNA, 30 bp, Artificial Sequence
  Description of Artificial Sequence: Synthetic oligonucleotide
swmcagbhcgataatctccctcctmtcact

SEQ ID NO: 3326 - DNA, 30 bp, Artificial Sequence
  Description of Artificial Sequence: Synthetic oligonucleotide
  modified_base (10)..(10): a, c, t or g
swmcagtacnhcaatctccctcctmtcact

SEQ ID NO: 3327 - DNA, 30 bp, Artificial Sequence
  Description of Artificial Sequence: Synthetic oligonucleotide
  modified_base (13)..(13): a, c, t or g
swmcagtacgatnhcctccctcctmtcact

SEQ ID NO: 3328 - DNA, 30 bp, Artificial Sequence
  Description of Artificial Sequence: Synthetic oligonucleotide
swmcagtacgataatywccctcctmtcact

SEQ ID NO: 3329 - DNA, 30 bp, Artificial Sequence
  Description of Artificial Sequence: Synthetic oligonucleotide
cagswmbhcgataatctccctcctmtcact

SEQ ID NO: 3330 - DNA, 30 bp, Artificial Sequence
  Description of Artificial Sequence: Synthetic oligonucleotide
  modified_base (10)..(10): a, c, t or g
cagswmtacnhcaatctccctcctmtcact

SEQ ID NO: 3331 - DNA, 30 bp, Artificial Sequence
  Description of Artificial Sequence: Synthetic oligonucleotide
  modified_base (13)..(13): a, c, t or g
cagswmtacgatnhcctccctcctmtcact

SEQ ID NO: 3332 - DNA, 30 bp, Artificial Sequence
  Description of Artificial Sequence: Synthetic oligonucleotide
cagswmtacgataatywccctcctmtcact

SEQ ID NO: 3333 - DNA, 30 bp, Artificial Sequence
  Description of Artificial Sequence: Synthetic oligonucleotide
swmswmtacgataatctccctcctwggact

SEQ ID NO: 3334 - DNA, 30 bp, Artificial Sequence
  Description of Artificial Sequence: Synthetic oligonucleotide
  modified_base (10)..(10): a, c, t or g
cagcagbhcnhcaatctccctcctwggact

SEQ ID NO: 3335 - DNA, 30 bp, Artificial Sequence
  Description of Artificial Sequence: Synthetic oligonucleotide
  modified_base (13)..(13): a, c, t or g
cagcagbhcgatnhcctccctcctwggact

SEQ ID NO: 3336 - DNA, 30 bp, Artificial Sequence
  Description of Artificial Sequence: Synthetic oligonucleotide
cagcagbhcgataatywccctcctwggact

SEQ ID NO: 3337 - DNA, 30 bp, Artificial Sequence
  Description of Artificial Sequence: Synthetic oligonucleotide
  modified_base (10)..(10): a, c, t or g
  modified_base (13)..(13): a, c, t or g
cagcagtacnhcnhcctccctcctwggact

SEQ ID NO: 3338 - DNA, 30 bp, Artificial Sequence
  Description of Artificial Sequence: Synthetic oligonucleotide
  modified_base (10)..(10): a, c, t or g
cagcagtacnhcaatywccctcctwggact

SEQ ID NO: 3339 - DNA, 30 bp, Artificial Sequence
  Description of Artificial Sequence: Synthetic oligonucleotide
  modified_base (13)..(13): a, c, t or g
cagcagtacgatnhcywccctcctwggact

SEQ ID NO: 3340 - DNA, 30 bp, Artificial Sequence
  Description of Artificial Sequence: Synthetic oligonucleotide
swmcagbhcgataatctccctcctwggact

SEQ ID NO: 3341 - DNA, 30 bp, Artificial Sequence
  Description of Artificial Sequence: Synthetic oligonucleotide
  modified_base (10)..(10): a, c, t or g
swmcagtacnhcaatctccctcctwggact

SEQ ID NO: 3342 - DNA, 30 bp, Artificial Sequence
  Description of Artificial Sequence: Synthetic oligonucleotide
  modified_base (13)..(13): a, c, t or g
swmcagtacgatnhcctccctcctwggact

SEQ ID NO: 3343 - DNA, 30 bp, Artificial Sequence
  Description of Artificial Sequence: Synthetic oligonucleotide
swmcagtacgataatywccctcctwggact

SEQ ID NO: 3344 - DNA, 30 bp, Artificial Sequence
  Description of Artificial Sequence: Synthetic oligonucleotide
cagswmbhcgataatctccctcctwggact

SEQ ID NO: 3345 - DNA, 30 bp, Artificial Sequence
  Description of Artificial Sequence: Synthetic oligonucleotide
  modified_base (10)..(10): a, c, t or g
cagswmtacnhcaatctccctcctwggact

SEQ ID NO: 3346 - DNA, 30 bp, Artificial Sequence
  Description of Artificial Sequence: Synthetic oligonucleotide
  modified_base (13)..(13): a, c, t or g
cagswmtacgatnhcctccctcctwggact

SEQ ID NO: 3347 - DNA, 30 bp, Artificial Sequence
  Description of Artificial Sequence: Synthetic oligonucleotide
cagswmtacgataatywccctcctwggact

SEQ ID NO: 3348 - DNA, 30 bp, Artificial Sequence
  Description of Artificial Sequence: Synthetic oligonucleotide
swmswmagctacagtactcctccttwcact

SEQ ID NO: 3349 - DNA, 30 bp, Artificial Sequence
  Description of Artificial Sequence: Synthetic oligonucleotide
  modified_base (8)..(8): a, c, t or g
cagcaavnabhcagtactcctccttwcact

SEQ ID NO: 3350 - DNA, 30 bp, Artificial Sequence
  Description of Artificial Sequence: Synthetic oligonucleotide
  modified_base (8)..(8): a, c, t or g
  modified_base (13)..(13): a, c, t or g
cagcaavnatacnhcactcctccttwcact

SEQ ID NO: 3351 - DNA, 30 bp, Artificial Sequence
  Description of Artificial Sequence: Synthetic oligonucleotide
  modified_base (8)..(8): a, c, t or g
cagcaavnatacagtbhccctccttwcact

SEQ ID NO: 3352 - DNA, 30 bp, Artificial Sequence
  Description of Artificial Sequence: Synthetic oligonucleotide
  modified_base (13)..(13): a, c, t or g
cagcaaagcbhcnhcactcctccttwcact

SEQ ID NO: 3353 - DNA, 30 bp, Artificial Sequence
  Description of Artificial Sequence: Synthetic oligonucleotide
cagcaaagcbhcagtbhccctccttwcact

SEQ ID NO: 3354 - DNA, 30 bp, Artificial Sequence
  Description of Artificial Sequence: Synthetic oligonucleotide
  modified_base (13)..(13): a, c, t or g
cagcaaagctacnhcbhccctccttwcact

SEQ ID NO: 3355 - DNA, 30 bp, Artificial Sequence
  Description of Artificial Sequence: Synthetic oligonucleotide
  modified_base (8)..(8): a, c, t or g
swmcaavnatacagtactcctccttwcact

SEQ ID NO: 3356 - DNA, 30 bp, Artificial Sequence
  Description of Artificial Sequence: Synthetic oligonucleotide
swmcaaagcbhcagtactcctccttwcact

SEQ ID NO: 3357 - DNA, 30 bp, Artificial Sequence
  Description of Artificial Sequence: Synthetic oligonucleotide
  modified_base (13)..(13): a, c, t or g
swmcaaagctacnhcactcctccttwcact

SEQ ID NO: 3358 - DNA, 30 bp, Artificial Sequence
  Description of Artificial Sequence: Synthetic oligonucleotide
swmcaaagctacagtbhccctccttwcact

SEQ ID NO: 3359 - DNA, 30 bp, Artificial Sequence
  Description of Artificial Sequence: Synthetic oligonucleotide
  modified_base (8)..(8): a, c, t or g
cagswmvnatacagtactcctccttwcact

SEQ ID NO: 3360 - DNA, 30 bp, Artificial Sequence
  Description of Artificial Sequence: Synthetic oligonucleotide
cagswmagcbhcagtactcctccttwcact

SEQ ID NO: 3361 - DNA, 30 bp, Artificial Sequence
  Description of Artificial Sequence: Synthetic oligonucleotide
  modified_base (13)..(13): a, c, t or g
cagswmagctacnhcactcctccttwcact

SEQ ID NO: 3362 - DNA, 30 bp, Artificial Sequence
  Description of Artificial Sequence: Synthetic oligonucleotide
cagswmagctacagtbhccctccttwcact

SEQ ID NO: 3363 - DNA, 30 bp, Artificial Sequence
  Description of Artificial Sequence: Synthetic oligonucleotide
swmswmagctacagtactcctcctmtcact

SEQ ID NO: 3364 - DNA, 30 bp, Artificial Sequence
  Description of Artificial Sequence: Synthetic oligonucleotide
  modified_base (8)..(8): a, c, t or g
cagcaavnabhcagtactcctcctmtcact

SEQ ID NO: 3365 - DNA, 30 bp, Artificial Sequence
  Description of Artificial Sequence: Synthetic oligonucleotide
  modified_base (8)..(8): a, c, t or g
  modified_base (13)..(13): a, c, t or g
cagcaavnatacnhcactcctcctmtcact

SEQ ID NO: 3366 - DNA, 30 bp, Artificial Sequence
  Description of Artificial Sequence: Synthetic oligonucleotide
  modified_base (8)..(8): a, c, t or g
cagcaavnatacagtbhccctcctmtcact

SEQ ID NO: 3367 - DNA, 30 bp, Artificial Sequence
  Description of Artificial Sequence: Synthetic oligonucleotide
  modified_base (13)..(13): a, c, t or g
cagcaaagcbhcnhcactcctcctmtcact

SEQ ID NO: 3368 - DNA, 30 bp, Artificial Sequence
  Description of Artificial Sequence: Synthetic oligonucleotide
cagcaaagcbhcagtbhccctcctmtcact

SEQ ID NO: 3369 - DNA, 30 bp, Artificial Sequence
  Description of Artificial Sequence: Synthetic oligonucleotide
  modified_base (13)..(13): a, c, t or g
cagcaaagctacnhcbhccctcctmtcact

SEQ ID NO: 3370 - DNA, 30 bp, Artificial Sequence
  Description of Artificial Sequence: Synthetic oligonucleotide
  modified_base (8)..(8): a, c, t or g
swmcaavnatacagtactcctcctmtcact

SEQ ID NO: 3371 - DNA, 30 bp, Artificial Sequence
  Description of Artificial Sequence: Synthetic oligonucleotide
swmcaaagcbhcagtactcctcctmtcact

SEQ ID NO: 3372 - DNA, 30 bp, Artificial Sequence
  Description of Artificial Sequence: Synthetic oligonucleotide
  modified_base (13)..(13): a, c, t or g
swmcaaagctacnhcactcctcctmtcact

SEQ ID NO: 3373 - DNA, 30 bp, Artificial Sequence
  Description of Artificial Sequence: Synthetic oligonucleotide
swmcaaagctacagtbhccctcctmtcact

SEQ ID NO: 3374 - DNA, 30 bp, Artificial Sequence
  Description of Artificial Sequence: Synthetic oligonucleotide
  modified_base (8)..(8): a, c, t or g
cagswmvnatacagtactcctcctmtcact

SEQ ID NO: 3375 - DNA, 30 bp, Artificial Sequence
  Description of Artificial Sequence: Synthetic oligonucleotide
cagswmagcbhcagtactcctcctmtcact

SEQ ID NO: 3376 - DNA, 30 bp, Artificial Sequence
  Description of Artificial Sequence: Synthetic oligonucleotide
  modified_base (13)..(13): a, c, t or g
cagswmagctacnhcactcctcctmtcact

SEQ ID NO: 3377 - DNA, 30 bp, Artificial Sequence
  Description of Artificial Sequence: Synthetic oligonucleotide
cagswmagctacagtbhccctcctmtcact

SEQ ID NO: 3378 - DNA, 30 bp, Artificial Sequence
  Description of Artificial Sequence: Synthetic oligonucleotide
swmswmagctacagtactcctcctwggact

SEQ ID NO: 3379 - DNA, 30 bp, Artificial Sequence
  Description of Artificial Sequence: Synthetic oligonucleotide
  modified_base (8)..(8): a, c, t or g
cagcaavnabhcagtactcctcctwggact

SEQ ID NO: 3380 - DNA, 30 bp, Artificial Sequence
  Description of Artificial Sequence: Synthetic oligonucleotide
  modified_base (8)..(8): a, c, t or g
  modified_base (13)..(13): a, c, t or g
cagcaavnatacnhcactcctcctwggact

SEQ ID NO: 3381 - DNA, 30 bp, Artificial Sequence
  Description of Artificial Sequence: Synthetic oligonucleotide
  modified_base (8)..(8): a, c, t or g
cagcaavnatacagtbhccctcctwggact

SEQ ID NO: 3382 - DNA, 30 bp, Artificial Sequence
  Description of Artificial Sequence: Synthetic oligonucleotide
  modified_base (13)..(13): a, c, t or g
cagcaaagcbhcnhcactcctcctwggact

SEQ ID NO: 3383 - DNA, 30 bp, Artificial Sequence
  Description of Artificial Sequence: Synthetic oligonucleotide
cagcaaagcbhcagtbhccctcctwggact

SEQ ID NO: 3384 - DNA, 30 bp, Artificial Sequence
  Description of Artificial Sequence: Synthetic oligonucleotide
  modified_base (13)..(13): a, c, t or g
cagcaaagctacnhcbhccctcctwggact

SEQ ID NO: 3385 - DNA, 30 bp, Artificial Sequence
  Description of Artificial Sequence: Synthetic oligonucleotide
  modified_base (8)..(8): a, c, t or g
swmcaavnatacagtactcctcctwggact

SEQ ID NO: 3386 - DNA, 30 bp, Artificial Sequence
  Description of Artificial Sequence: Synthetic oligonucleotide
swmcaaagcbhcagtactcctcctwggact

SEQ ID NO: 3387 - DNA, 30 bp, Artificial Sequence
  Description of Artificial Sequence: Synthetic oligonucleotide
  modified_base (13)..(13): a, c, t or g
swmcaaagctacnhcactcctcctwggact

SEQ ID NO: 3388 - DNA, 30 bp, Artificial Sequence
  Description of Artificial Sequence: Synthetic oligonucleotide
swmcaaagctacagtbhccctcctwggact

SEQ ID NO: 3389 - DNA, 30 bp, Artificial Sequence
  Description of Artificial Sequence: Synthetic oligonucleotide
  modified_base (8)..(8): a, c, t or g
cagswmvnatacagtactcctcctwggact

SEQ ID NO: 3390 - DNA, 30 bp, Artificial Sequence
  Description of Artificial Sequence: Synthetic oligonucleotide
cagswmagcbhcagtactcctcctwggact

SEQ ID NO: 3391 - DNA, 30 bp, Artificial Sequence
  Description of Artificial Sequence: Synthetic oligonucleotide
  modified_base (13)..(13): a, c, t or g
cagswmagctacnhcactcctcctwggact

SEQ ID NO: 3392 - DNA, 30 bp, Artificial Sequence
  Description of Artificial Sequence: Synthetic oligonucleotide
cagswmagctacagtbhccctcctwggact

SEQ ID NO: 3393 - DNA, 30 bp, Artificial Sequence
  Description of Artificial Sequence: Synthetic oligonucleotide
dtsswmgcactccagactcctccttwcact

SEQ ID NO: 3394 - DNA, 30 bp, Artificial Sequence
  Description of Artificial Sequence: Synthetic oligonucleotide
  modified_base (8)..(8): a, c, t or g
  modified_base (11)..(11): a, c, t or g
atgcagvnamnacagactcctccttwcact

SEQ ID NO: 3395 - DNA, 30 bp, Artificial Sequence
  Description of Artificial Sequence: Synthetic oligonucleotide
  modified_base (8)..(8): a, c, t or g
atgcagvnactcsrmactcctccttwcact

SEQ ID NO: 3396 - DNA, 30 bp, Artificial Sequence
  Description of Artificial Sequence: Synthetic oligonucleotide
  modified_base (8)..(8): a, c, t or g
atgcagvnactccagvbccctccttwcact

SEQ ID NO: 3397 - DNA, 30 bp, Artificial Sequence
  Description of Artificial Sequence: Synthetic oligonucleotide
  modified_base (11)..(11): a, c, t or g
atgcaggcamnasrmactcctccttwcact

SEQ ID NO: 3398 - DNA, 30 bp, Artificial Sequence
  Description of Artificial Sequence: Synthetic oligonucleotide
  modified_base (11)..(11): a, c, t or g
atgcaggcamnacagvbccctccttwcact

SEQ ID NO: 3399 - DNA, 30 bp, Artificial Sequence
  Description of Artificial Sequence: Synthetic oligonucleotide
atgcaggcactcsrmvbccctccttwcact

SEQ ID NO: 3400 - DNA, 30 bp, Artificial Sequence
  Description of Artificial Sequence: Synthetic oligonucleotide
  modified_base (8)..(8): a, c, t or g
dtscagvnactccagactcctccttwcact

SEQ ID NO: 3401 - DNA, 30 bp, Artificial Sequence
  Description of Artificial Sequence: Synthetic oligonucleotide
  modified_base (11)..(11): a, c, t or g
dtscaggcamnacagactcctccttwcact

SEQ ID NO: 3402 - DNA, 30 bp, Artificial Sequence
  Description of Artificial Sequence: Synthetic oligonucleotide
dtscaggcactcsrmactcctccttwcact

SEQ ID NO: 3403 - DNA, 30 bp, Artificial Sequence
  Description of Artificial Sequence: Synthetic oligonucleotide
dtscaggcactccagvbccctccttwcact

SEQ ID NO: 3404 - DNA, 30 bp, Artificial Sequence
  Description of Artificial Sequence: Synthetic oligonucleotide
  modified_base (8)..(8): a, c, t or g
atgswmvnactccagactcctccttwcact

SEQ ID NO: 3405 - DNA, 30 bp, Artificial Sequence
  Description of Artificial Sequence: Synthetic oligonucleotide
  modified_base (11)..(11): a, c, t or g
atgswmgcamnacagactcctccttwcact

SEQ ID NO: 3406 - DNA, 30 bp, Artificial Sequence
  Description of Artificial Sequence: Synthetic oligonucleotide
atgswmgcactcsrmactcctccttwcact

SEQ ID NO: 3407 - DNA, 30 bp, Artificial Sequence
  Description of Artificial Sequence: Synthetic oligonucleotide
atgswmgcactccagvbccctccttwcact

SEQ ID NO: 3408 - DNA, 30 bp, Artificial Sequence
  Description of Artificial Sequence: Synthetic oligonucleotide
dtsswmgcactccagactcctcctmtcact

SEQ ID NO: 3409 - DNA, 30 bp, Artificial Sequence
  Description of Artificial Sequence: Synthetic oligonucleotide
  modified_base (8)..(8): a, c, t or g
  modified_base (11)..(11): a, c, t or g
atgcagvnamnacagactcctcctmtcact

SEQ ID NO: 3410 - DNA, 30 bp, Artificial Sequence
  Description of Artificial Sequence: Synthetic oligonucleotide
  modified_base (8)..(8): a, c, t or g
atgcagvnactcsrmactcctcctmtcact

SEQ ID NO: 3411 - DNA, 30 bp, Artificial Sequence
  Description of Artificial Sequence: Synthetic oligonucleotide
  modified_base (8)..(8): a, c, t or g
atgcagvnactccagvbccctcctmtcact

SEQ ID NO: 3412 - DNA, 30 bp, Artificial Sequence
  Description of Artificial Sequence: Synthetic oligonucleotide
  modified_base (11)..(11): a, c, t or g
atgcaggcamnasrmactcctcctmtcact

SEQ ID NO: 3413 - DNA, 30 bp, Artificial Sequence
  Description of Artificial Sequence: Synthetic oligonucleotide
  modified_base (11)..(11): a, c, t or g
atgcaggcamnacagvbccctcctmtcact

SEQ ID NO: 3414 - DNA, 30 bp, Artificial Sequence
  Description of Artificial Sequence: Synthetic oligonucleotide
atgcaggcactcsrmvbccctcctmtcact

SEQ ID NO: 3415 - DNA, 30 bp, Artificial Sequence
  Description of Artificial Sequence: Synthetic oligonucleotide
  modified_base (8)..(8): a, c, t or g
dtscagvnactccagactcctcctmtcact

SEQ ID NO: 3416 - DNA, 30 bp, Artificial Sequence
  Description of Artificial Sequence: Synthetic oligonucleotide
  modified_base (11)..(11): a, c, t or g
dtscaggcamnacagactcctcctmtcact

SEQ ID NO: 3417 - DNA, 30 bp, Artificial Sequence
  Description of Artificial Sequence: Synthetic oligonucleotide
dtscaggcactcsrmactcctcctmtcact

SEQ ID NO: 3418 - DNA, 30 bp, Artificial Sequence
  Description of Artificial Sequence: Synthetic oligonucleotide
dtscaggcactccagvbccctcctmtcact

SEQ ID NO: 3419 - DNA, 30 bp, Artificial Sequence
  Description of Artificial Sequence: Synthetic oligonucleotide
  modified_base (8)..(8): a, c, t or g
atgswmvnactccagactcctcctmtcact

SEQ ID NO: 3420 - DNA, 30 bp, Artificial Sequence
  Description of Artificial Sequence: Synthetic oligonucleotide
  modified_base (11)..(11): a, c, t or g
atgswmgcamnacagactcctcctmtcact

SEQ ID NO: 3421 - DNA, 30 bp, Artificial Sequence
  Description of Artificial Sequence: Synthetic oligonucleotide
atgswmgcactcsrmactcctcctmtcact

SEQ ID NO: 3422 - DNA, 30 bp, Artificial Sequence
  Description of Artificial Sequence: Synthetic oligonucleotide
atgswmgcactccagvbccctcctmtcact

SEQ ID NO: 3423 - DNA, 30 bp, Artificial Sequence
  Description of Artificial Sequence: Synthetic oligonucleotide
dtsswmgcactccagactcctcctwggact

SEQ ID NO: 3424 - DNA, 30 bp, Artificial Sequence
  Description of Artificial Sequence: Synthetic oligonucleotide
  modified_base (8)..(8): a, c, t or g
  modified_base (11)..(11): a, c, t or g
atgcagvnamnacagactcctcctwggact

SEQ ID NO: 3425 - DNA, 30 bp, Artificial Sequence
  Description of Artificial Sequence: Synthetic oligonucleotide
  modified_base (8)..(8): a, c, t or g
atgcagvnactcsrmactcctcctwggact

SEQ ID NO: 3426 - DNA, 30 bp, Artificial Sequence
  Description of Artificial Sequence: Synthetic oligonucleotide
  modified_base (8)..(8): a, c, t or g
atgcagvnactccagvbccctcctwggact

SEQ ID NO: 3427 - DNA, 30 bp, Artificial Sequence
  Description of Artificial Sequence: Synthetic oligonucleotide
  modified_base (11)..(11): a, c, t or g
atgcaggcamnasrmactcctcctwggact

SEQ ID NO: 3428 - DNA, 30 bp, Artificial Sequence
  Description of Artificial Sequence: Synthetic oligonucleotide
  modified_base (11)..(11): a, c, t or g
atgcaggcamnacagvbccctcctwggact

SEQ ID NO: 3429 - DNA, 30 bp, Artificial Sequence
  Description of Artificial Sequence: Synthetic oligonucleotide
atgcaggcactcsrmvbccctcctwggact

SEQ ID NO: 3430 - DNA, 30 bp, Artificial Sequence
  Description of Artificial Sequence: Synthetic oligonucleotide
  modified_base (8)..(8): a, c, t or g
dtscagvnactccagactcctcctwggact

SEQ ID NO: 3431 - DNA, 30 bp, Artificial Sequence
  Description of Artificial Sequence: Synthetic oligonucleotide
  modified_base (11)..(11): a, c, t or g
dtscaggcamnacagactcctcctwggact

SEQ ID NO: 3432 - DNA, 30 bp, Artificial Sequence
  Description of Artificial Sequence: Synthetic oligonucleotide
dtscaggcactcsrmactcctcctwggact

SEQ ID NO: 3433 - DNA, 30 bp, Artificial Sequence
  Description of Artificial Sequence: Synthetic oligonucleotide
dtscaggcactccagvbccctcctwggact

SEQ ID NO: 3434 - DNA, 30 bp, Artificial Sequence
  Description of Artificial Sequence: Synthetic oligonucleotide
  modified_base (8)..(8): a, c, t or g
atgswmvnactccagactcctcctwggact

SEQ ID NO: 3435 - DNA, 30 bp, Artificial Sequence
  Description of Artificial Sequence: Synthetic oligonucleotide
  modified_base (11)..(11): a, c, t or g
atgswmgcamnacagactcctcctwggact

SEQ ID NO: 3436 - DNA, 30 bp, Artificial Sequence
  Description of Artificial Sequence: Synthetic oligonucleotide
atgswmgcactcsrmactcctcctwggact

SEQ ID NO: 3437 - DNA, 30 bp, Artificial Sequence
  Description of Artificial Sequence: Synthetic oligonucleotide
atgswmgcactccagvbccctcctwggact

SEQ ID NO: 3438 - DNA, 30 bp, Artificial Sequence
  Description of Artificial Sequence: Synthetic oligonucleotide
swmswmagaagtaattggcctccttwcact

SEQ ID NO: 3439 - DNA, 30 bp, Artificial Sequence
  Description of Artificial Sequence: Synthetic oligonucleotide
  modified_base (10)..(10): a, c, t or g
cagcagbhcnhcaattggcctccttwcact

SEQ ID NO: 3440 - DNA, 30 bp, Artificial Sequence
  Description of Artificial Sequence: Synthetic oligonucleotide
  modified_base (13)..(13): a, c, t or g
cagcagbhcagtnhctggcctccttwcact

SEQ ID NO: 3441 - DNA, 30 bp, Artificial Sequence
  Description of Artificial Sequence: Synthetic oligonucleotide
cagcagbhcagtaatywccctccttwcact

SEQ ID NO: 3442 - DNA, 30 bp, Artificial Sequence
  Description of Artificial Sequence: Synthetic oligonucleotide
  modified_base (10)..(10): a, c, t or g
  modified_base (13)..(13): a, c, t or g
cagcagaganhcnhctggcctccttwcact

SEQ ID NO: 3443 - DNA, 30 bp, Artificial Sequence
  Description of Artificial Sequence: Synthetic oligonucleotide
  modified_base (10)..(10): a, c, t or g
cagcagaganhcaatywccctccttwcact

SEQ ID NO: 3444 - DNA, 30 bp, Artificial Sequence
  Description of Artificial Sequence: Synthetic oligonucleotide
  modified_base (13)..(13): a, c, t or g
cagcagagaagtnhcywccctccttwcact

SEQ ID NO: 3445 - DNA, 30 bp, Artificial Sequence
  Description of Artificial Sequence: Synthetic oligonucleotide
swmcagbhcagtaattggcctccttwcact

SEQ ID NO: 3446 - DNA, 30 bp, Artificial Sequence
  Description of Artificial Sequence: Synthetic oligonucleotide
  modified_base (10)..(10): a, c, t or g
swmcagaganhcaattggcctccttwcact

SEQ ID NO: 3447 - DNA, 30 bp, Artificial Sequence
  Description of Artificial Sequence: Synthetic oligonucleotide
  modified_base (13)..(13): a, c, t or g
swmcagagaagtnhctggcctccttwcact

SEQ ID NO: 3448 - DNA, 30 bp, Artificial Sequence
  Description of Artificial Sequence: Synthetic oligonucleotide
swmcagagaagtaatywccctccttwcact

SEQ ID NO: 3449 - DNA, 30 bp, Artificial Sequence
  Description of Artificial Sequence: Synthetic oligonucleotide
cagswmbhcagtaattggcctccttwcact

SEQ ID NO: 3450 - DNA, 30 bp, Artificial Sequence
  Description of Artificial Sequence: Synthetic oligonucleotide
  modified_base (10)..(10): a, c, t or g
cagswmaganhcaattggcctccttwcact

SEQ ID NO: 3451 - DNA, 30 bp, Artificial Sequence
  Description of Artificial Sequence: Synthetic oligonucleotide
  modified_base (13)..(13): a, c, t or g
cagswmagaagtnhctggcctccttwcact

SEQ ID NO: 3452 - DNA, 30 bp, Artificial Sequence
  Description of Artificial Sequence: Synthetic oligonucleotide
cagswmagaagtaatywccctccttwcact

SEQ ID NO: 3453 - DNA, 30 bp, Artificial Sequence
  Description of Artificial Sequence: Synthetic oligonucleotide
swmswmagaagtaattggcctcctmtcact

SEQ ID NO: 3454 - DNA, 30 bp, Artificial Sequence
  Description of Artificial Sequence: Synthetic oligonucleotide
  modified_base (10)..(10): a, c, t or g
cagcagbhcnhcaattggcctcctmtcact

SEQ ID NO: 3455 - DNA, 30 bp, Artificial Sequence
  Description of Artificial Sequence: Synthetic oligonucleotide
  modified_base (13)..(13): a, c, t or g
cagcagbhcagtnhctggcctcctmtcact

SEQ ID NO: 3456 - DNA, 30 bp, Artificial Sequence
  Description of Artificial Sequence: Synthetic oligonucleotide
cagcagbhcagtaatywccctcctmtcact

SEQ ID NO: 3457 - DNA, 30 bp, Artificial Sequence
  Description of Artificial Sequence: Synthetic oligonucleotide
  modified_base (10)..(10): a, c, t or g
  modified_base (13)..(13): a, c, t or g
cagcagaganhcnhctggcctcctmtcact

SEQ ID NO: 3458 - DNA, 30 bp, Artificial Sequence
  Description of Artificial Sequence: Synthetic oligonucleotide
  modified_base (10)..(10): a, c, t or g
cagcagaganhcaatywccctcctmtcact

SEQ ID NO: 3459 - DNA, 30 bp, Artificial Sequence
  Description of Artificial Sequence: Synthetic oligonucleotide
  modified_base (13)..(13): a, c, t or g
cagcagagaagtnhcywccctcctmtcact

SEQ ID NO: 3460 - DNA, 30 bp, Artificial Sequence
  Description of Artificial Sequence: Synthetic oligonucleotide
swmcagbhcagtaattggcctcctmtcact

SEQ ID NO: 3461 - DNA, 30 bp, Artificial Sequence
  Description of Artificial Sequence: Synthetic oligonucleotide
  modified_base (10)..(10): a, c, t or g
swmcagaganhcaattggcctcctmtcact

SEQ ID NO: 3462 - DNA, 30 bp, Artificial Sequence
  Description of Artificial Sequence: Synthetic oligonucleotide
  modified_base (13)..(13): a, c, t or g
swmcagagaagtnhctggcctcctmtcact

SEQ ID NO: 3463 - DNA, 30 bp, Artificial Sequence
  Description of Artificial Sequence: Synthetic oligonucleotide
swmcagagaagtaatywccctcctmtcact

SEQ ID NO: 3464 - DNA, 30 bp, Artificial Sequence
  Description of Artificial Sequence: Synthetic oligonucleotide
cagswmbhcagtaattggcctcctmtcact

SEQ ID NO: 3465 - DNA, 30 bp, Artificial Sequence
  Description of Artificial Sequence: Synthetic oligonucleotide
  modified_base (10)..(10): a, c, t or g
cagswmaganhcaattggcctcctmtcact

SEQ ID NO: 3466 - DNA, 30 bp, Artificial Sequence
  Description of Artificial Sequence: Synthetic oligonucleotide
  modified_base (13)..(13): a, c, t or g
cagswmagaagtnhctggcctcctmtcact

SEQ ID NO: 3467 - DNA, 30 bp, Artificial Sequence
  Description of Artificial Sequence: Synthetic oligonucleotide
cagswmagaagtaatywccctcctmtcact

SEQ ID NO: 3468 - DNA, 30 bp, Artificial Sequence
  Description of Artificial Sequence: Synthetic oligonucleotide
swmswmagaagtaattggcctcctwggact

SEQ ID NO: 3469 - DNA, 30 bp, Artificial Sequence
  Description of Artificial Sequence: Synthetic oligonucleotide
  modified_base (10)..(10): a, c, t or g
cagcagbhcnhcaattggcctcctwggact

SEQ ID NO: 3470 - DNA, 30 bp, Artificial Sequence
  Description of Artificial Sequence: Synthetic oligonucleotide
  modified_base (13)..(13): a, c, t or g
cagcagbhcagtnhctggcctcctwggact

SEQ ID NO: 3471 - DNA, 30 bp, Artificial Sequence
  Description of Artificial Sequence: Synthetic oligonucleotide
cagcagbhcagtaatywccctcctwggact

SEQ ID NO: 3472 - DNA, 30 bp, Artificial Sequence
  Description of Artificial Sequence: Synthetic oligonucleotide
  modified_base (10)..(10): a, c, t or g
  modified_base (13)..(13): a, c, t or g
cagcagaganhcnhctggcctcctwggact

SEQ ID NO: 3473 - DNA, 30 bp, Artificial Sequence
  Description of Artificial Sequence: Synthetic oligonucleotide
  modified_base (10)..(10): a, c, t or g
cagcagaganhcaatywccctcctwggact

SEQ ID NO: 3474 - DNA, 30 bp, Artificial Sequence
  Description of Artificial Sequence: Synthetic oligonucleotide
  modified_base (13)..(13): a, c, t or g
cagcagagaagtnhcywccctcctwggact

SEQ ID NO: 3475 - DNA, 30 bp, Artificial Sequence
  Description of Artificial Sequence: Synthetic oligonucleotide
swmcagbhcagtaattggcctcctwggact

SEQ ID NO: 3476 - DNA, 30 bp, Artificial Sequence
  Description of Artificial Sequence: Synthetic oligonucleotide
  modified_base (10)..(10): a, c, t or g
swmcagaganhcaattggcctcctwggact

SEQ ID NO: 3477 - DNA, 30 bp, Artificial Sequence
  Description of Artificial Sequence: Synthetic oligonucleotide
  modified_base (13)..(13): a, c, t or g
swmcagagaagtnhctggcctcctwggact

SEQ ID NO: 3478 - DNA, 30 bp, Artificial Sequence
  Description of Artificial Sequence: Synthetic oligonucleotide
swmcagagaagtaatywccctcctwggact

SEQ ID NO: 3479 - DNA, 30 bp, Artificial Sequence
  Description of Artificial Sequence: Synthetic oligonucleotide
cagswmbhcagtaattggcctcctwggact

SEQ ID NO: 3480 - DNA, 30 bp, Artificial Sequence
  Description of Artificial Sequence: Synthetic oligonucleotide
  modified_base (10)..(10): a, c, t or g
cagswmaganhcaattggcctcctwggact

SEQ ID NO: 3481 - DNA, 30 bp, Artificial Sequence
  Description of Artificial Sequence: Synthetic oligonucleotide
  modified_base (13)..(13): a, c, t or g
cagswmagaagtnhctggcctcctwggact

SEQ ID NO: 3482 - DNA, 30 bp, Artificial Sequence
  Description of Artificial Sequence: Synthetic oligonucleotide
cagswmagaagtaatywccctcctwggact

SEQ ID NO: 3483 - DNA, 30 bp, Artificial Sequence
  Description of Artificial Sequence: Synthetic oligonucleotide
swmswmtacaataattggcctccttwcact

SEQ ID NO: 3484 - DNA, 30 bp, Artificial Sequence
  Description of Artificial Sequence: Synthetic oligonucleotide
  modified_base (13)..(13): a, c, t or g
cagcagbhcaatnhctggcctccttwcact

SEQ ID NO: 3485 - DNA, 30 bp, Artificial Sequence
  Description of Artificial Sequence: Synthetic oligonucleotide
cagcagbhcaataatywccctccttwcact

SEQ ID NO: 3486 - DNA, 30 bp, Artificial Sequence
  Description of Artificial Sequence: Synthetic oligonucleotide
  modified_base (10)..(10): a, c, t or g
  modified_base (13)..(13): a, c, t or g
cagcagtacnhcnhctggcctccttwcact

SEQ ID NO: 3487 - DNA, 30 bp, Artificial Sequence
  Description of Artificial Sequence: Synthetic oligonucleotide
  modified_base (13)..(13): a, c, t or g
cagcagtacaatnhcywccctccttwcact

SEQ ID NO: 3488 - DNA, 30 bp, Artificial Sequence
  Description of Artificial Sequence: Synthetic oligonucleotide
swmcagbhcaataattggcctccttwcact

SEQ ID NO: 3489 - DNA, 30 bp, Artificial Sequence
  Description of Artificial Sequence: Synthetic oligonucleotide
  modified_base (10)..(10): a, c, t or g
swmcagtacnhcaattggcctccttwcact

SEQ ID NO: 3490 - DNA, 30 bp, Artificial Sequence
  Description of Artificial Sequence: Synthetic oligonucleotide
  modified_base (13)..(13): a, c, t or g
swmcagtacaatnhctggcctccttwcact

SEQ ID NO: 3491 - DNA, 30 bp, Artificial Sequence
  Description of Artificial Sequence: Synthetic oligonucleotide
swmcagtacaataatywccctccttwcact

SEQ ID NO: 3492 - DNA, 30 bp, Artificial Sequence
  Description of Artificial Sequence: Synthetic oligonucleotide
cagswmbhcaataattggcctccttwcact

SEQ ID NO: 3493 - DNA, 30 bp, Artificial Sequence
  Description of Artificial Sequence: Synthetic oligonucleotide
  modified_base (10)..(10): a, c, t or g
cagswmtacnhcaattggcctccttwcact

SEQ ID NO: 3494 - DNA, 30 bp, Artificial Sequence
  Description of Artificial Sequence: Synthetic oligonucleotide
  modified_base (13)..(13): a, c, t or g
cagswmtacaatnhctggcctccttwcact

SEQ ID NO: 3495 - DNA, 30 bp, Artificial Sequence
  Description of Artificial Sequence: Synthetic oligonucleotide
cagswmtacaataatywccctccttwcact

SEQ ID NO: 3496 - DNA, 30 bp, Artificial Sequence
  Description of Artificial Sequence: Synthetic oligonucleotide
swmswmtacaataattggcctcctmtcact

SEQ ID NO: 3497 - DNA, 30 bp, Artificial Sequence
  Description of Artificial Sequence: Synthetic oligonucleotide
  modified_base (13)..(13): a, c, t or g
cagcagbhcaatnhctggcctcctmtcact

SEQ ID NO: 3498 - DNA, 30 bp, Artificial Sequence
  Description of Artificial Sequence: Synthetic oligonucleotide
cagcagbhcaataatywccctcctmtcact

SEQ ID NO: 3499 - DNA, 30 bp, Artificial Sequence
  Description of Artificial Sequence: Synthetic oligonucleotide
  modified_base (10)..(10): a, c, t or g
  modified_base (13)..(13): a, c, t or g
cagcagtacnhcnhctggcctcctmtcact

SEQ ID NO: 3500 - DNA, 30 bp, Artificial Sequence
  Description of Artificial Sequence: Synthetic oligonucleotide
  modified_base (13)..(13): a, c, t or g
cagcagtacaatnhcywccctcctmtcact

SEQ ID NO: 3501 - DNA, 30 bp, Artificial Sequence
  Description of Artificial Sequence: Synthetic oligonucleotide
swmcagbhcaataattggcctcctmtcact

SEQ ID NO: 3502 - DNA, 30 bp, Artificial Sequence
  Description of Artificial Sequence: Synthetic oligonucleotide
  modified_base (10)..(10): a, c, t or g
swmcagtacnhcaattggcctcctmtcact

SEQ ID NO: 3503 - DNA, 30 bp, Artificial Sequence
  Description of Artificial Sequence: Synthetic oligonucleotide
  modified_base (13)..(13): a, c, t or g
swmcagtacaatnhctggcctcctmtcact

SEQ ID NO: 3504 - DNA, 30 bp, Artificial Sequence
  Description of Artificial Sequence: Synthetic oligonucleotide
swmcagtacaataatywccctcctmtcact

SEQ ID NO: 3505 - DNA, 30 bp, Artificial Sequence
  Description of Artificial Sequence: Synthetic oligonucleotide
cagswmbhcaataattggcctcctmtcact

SEQ ID NO: 3506 - DNA, 30 bp, Artificial Sequence
  Description of Artificial Sequence: Synthetic oligonucleotide
  modified_base (10)..(10): a, c, t or g
cagswmtacnhcaattggcctcctmtcact

SEQ ID NO: 3507 - DNA, 30 bp, Artificial Sequence
  Description of Artificial Sequence: Synthetic oligonucleotide
  modified_base (13)..(13): a, c, t or g
cagswmtacaatnhctggcctcctmtcact

SEQ ID NO: 3508 - DNA, 30 bp, Artificial Sequence
  Description of Artificial Sequence: Synthetic oligonucleotide
cagswmtacaataatywccctcctmtcact

SEQ ID NO: 3509 - DNA, 30 bp, Artificial Sequence
  Description of Artificial Sequence: Synthetic oligonucleotide
swmswmtacaataattggcctcctwggact

SEQ ID NO: 3510 - DNA, 30 bp, Artificial Sequence
  Description of Artificial Sequence: Synthetic oligonucleotide
  modified_base (13)..(13): a, c, t or g
cagcagbhcaatnhctggcctcctwggact

SEQ ID NO: 3511 - DNA, 30 bp, Artificial Sequence
  Description of Artificial Sequence: Synthetic oligonucleotide
cagcagbhcaataatywccctcctwggact

SEQ ID NO: 3512 - DNA, 30 bp, Artificial Sequence
  Description of Artificial Sequence: Synthetic oligonucleotide
  modified_base (10)..(10): a, c, t or g
  modified_base (13)..(13): a, c, t or g
cagcagtacnhcnhctggcctcctwggact

SEQ ID NO: 3513 - DNA, 30 bp, Artificial Sequence
  Description of Artificial Sequence: Synthetic oligonucleotide
  modified_base (13)..(13): a, c, t or g
cagcagtacaatnhcywccctcctwggact

SEQ ID NO: 3514 - DNA, 30 bp, Artificial Sequence
  Description of Artificial Sequence: Synthetic oligonucleotide
swmcagbhcaataattggcctcctwggact

SEQ ID NO: 3515 - DNA, 30 bp, Artificial Sequence
  Description of Artificial Sequence: Synthetic oligonucleotide
  modified_base (10)..(10): a, c, t or g
swmcagtacnhcaattggcctcctwggact

SEQ ID NO: 3516 - DNA, 30 bp, Artificial Sequence
  Description of Artificial Sequence: Synthetic oligonucleotide
  modified_base (13)..(13): a, c, t or g
swmcagtacaatnhctggcctcctwggact

SEQ ID NO: 3517 - DNA, 30 bp, Artificial Sequence
  Description of Artificial Sequence: Synthetic oligonucleotide
swmcagtacaataatywccctcctwggact

SEQ ID NO: 3518 - DNA, 30 bp, Artificial Sequence
  Description of Artificial Sequence: Synthetic oligonucleotide
cagswmbhcaataattggcctcctwggact

SEQ ID NO: 3519 - DNA, 30 bp, Artificial Sequence
  Description of Artificial Sequence: Synthetic oligonucleotide
  modified_base (10)..(10): a, c, t or g
cagswmtacnhcaattggcctcctwggact

SEQ ID NO: 3520 - DNA, 30 bp, Artificial Sequence
  Description of Artificial Sequence: Synthetic oligonucleotide
  modified_base (13)..(13): a, c, t or g
cagswmtacaatnhctggcctcctwggact

SEQ ID NO: 3521 - DNA, 30 bp, Artificial Sequence
  Description of Artificial Sequence: Synthetic oligonucleotide
cagswmtacaataatywccctcctwggact

SEQ ID NO: 3522 - DNA, 30 bp, Artificial Sequence
  Description of Artificial Sequence: Synthetic oligonucleotide
swmswmtacggaagtagtcctccttwcact

SEQ ID NO: 3523 - DNA, 30 bp, Artificial Sequence
  Description of Artificial Sequence: Synthetic oligonucleotide
cagcagbhcbhcagtagtcctccttwcact

SEQ ID NO: 3524 - DNA, 30 bp, Artificial Sequence
  Description of Artificial Sequence: Synthetic oligonucleotide
  modified_base (14)..(14): a, c, t or g
cagcagbhcggavncagtcctccttwcact

SEQ ID NO: 3525 - DNA, 30 bp, Artificial Sequence
  Description of Artificial Sequence: Synthetic oligonucleotide
cagcagbhcggaagtbhccctccttwcact

SEQ ID NO: 3526 - DNA, 30 bp, Artificial Sequence
  Description of Artificial Sequence: Synthetic oligonucleotide
  modified_base (14)..(14): a, c, t or g
cagcagtacbhcvncagtcctccttwcact

SEQ ID NO: 3527 - DNA, 30 bp, Artificial Sequence
  Description of Artificial Sequence: Synthetic oligonucleotide
cagcagtacbhcagtbhccctccttwcact

SEQ ID NO: 3528 - DNA, 30 bp, Artificial Sequence
  Description of Artificial Sequence: Synthetic oligonucleotide
  modified_base (14)..(14): a, c, t or g
cagcagtacggavncbhccctccttwcact

SEQ ID NO: 3529 - DNA, 30 bp, Artificial Sequence
  Description of Artificial Sequence: Synthetic oligonucleotide
swmcagbhcggaagtagtcctccttwcact

SEQ ID NO: 3530 - DNA, 30 bp, Artificial Sequence
  Description of Artificial Sequence: Synthetic oligonucleotide
swmcagtacbhcagtagtcctccttwcact

SEQ ID NO: 3531 - DNA, 30 bp, Artificial Sequence
  Description of Artificial Sequence: Synthetic oligonucleotide
  modified_base (14)..(14): a, c, t or g
swmcagtacggavncagtcctccttwcact

SEQ ID NO: 3532 - DNA, 30 bp, Artificial Sequence
  Description of Artificial Sequence: Synthetic oligonucleotide
swmcagtacggaagtbhccctccttwcact

SEQ ID NO: 3533 - DNA, 30 bp, Artificial Sequence
  Description of Artificial Sequence: Synthetic oligonucleotide
cagswmbhcggaagtagtcctccttwcact

SEQ ID NO: 3534 - DNA, 30 bp, Artificial Sequence
  Description of Artificial Sequence: Synthetic oligonucleotide
cagswmtacbhcagtagtcctccttwcact

SEQ ID NO: 3535 - DNA, 30 bp, Artificial Sequence
  Description of Artificial Sequence: Synthetic oligonucleotide
  modified_base (14)..(14): a, c, t or g
cagswmtacggavncagtcctccttwcact

SEQ ID NO: 3536 - DNA, 30 bp, Artificial Sequence
  Description of Artificial Sequence: Synthetic oligonucleotide
cagswmtacggaagtbhccctccttwcact

SEQ ID NO: 3537 - DNA, 30 bp, Artificial Sequence
  Description of Artificial Sequence: Synthetic oligonucleotide
swmswmtacggaagtagtcctcctmtcact

SEQ ID NO: 3538 - DNA, 30 bp, Artificial Sequence
  Description of Artificial Sequence: Synthetic oligonucleotide
cagcagbhcbhcagtagtcctcctmtcact

SEQ ID NO: 3539 - DNA, 30 bp, Artificial Sequence
  Description of Artificial Sequence: Synthetic oligonucleotide
  modified_base (14)..(14): a, c, t or g
cagcagbhcggavncagtcctcctmtcact

SEQ ID NO: 3540 - DNA, 30 bp, Artificial Sequence
  Description of Artificial Sequence: Synthetic oligonucleotide
cagcagbhcggaagtbhccctcctmtcact

SEQ ID NO: 3541 - DNA, 30 bp, Artificial Sequence
  Description of Artificial Sequence: Synthetic oligonucleotide
  modified_base (14)..(14): a, c, t or g
cagcagtacbhcvncagtcctcctmtcact

SEQ ID NO: 3542 - DNA, 30 bp, Artificial Sequence
  Description of Artificial Sequence: Synthetic oligonucleotide
cagcagtacbhcagtbhccctcctmtcact

SEQ ID NO: 3543 - DNA, 30 bp, Artificial Sequence
  Description of Artificial Sequence: Synthetic oligonucleotide
  modified_base (14)..(14): a, c, t or g
cagcagtacggavncbhccctcctmtcact

SEQ ID NO: 3544 - DNA, 30 bp, Artificial Sequence
  Description of Artificial Sequence: Synthetic oligonucleotide
swmcagbhcggaagtagtcctcctmtcact

SEQ ID NO: 3545 - DNA, 30 bp, Artificial Sequence
  Description of Artificial Sequence: Synthetic oligonucleotide
swmcagtacbhcagtagtcctcctmtcact

SEQ ID NO: 3546 - DNA, 30 bp, Artificial Sequence
  Description of Artificial Sequence: Synthetic oligonucleotide
  modified_base (14)..(14): a, c, t or g
swmcagtacggavncagtcctcctmtcact

SEQ ID NO: 3547 - DNA, 30 bp, Artificial Sequence
  Description of Artificial Sequence: Synthetic oligonucleotide
swmcagtacggaagtbhccctcctmtcact

SEQ ID NO: 3548 - DNA, 30 bp, Artificial Sequence
  Description of Artificial Sequence: Synthetic oligonucleotide
cagswmbhcggaagtagtcctcctmtcact

SEQ ID NO: 3549 - DNA, 30 bp, Artificial Sequence
  Description of Artificial Sequence: Synthetic oligonucleotide
cagswmtacbhcagtagtcctcctmtcact

SEQ ID NO: 3550 - DNA, 30 bp, Artificial Sequence
  Description of Artificial Sequence: Synthetic oligonucleotide
  modified_base (14)..(14): a, c, t or g
cagswmtacggavncagtcctcctmtcact

SEQ ID NO: 3551 - DNA, 30 bp, Artificial Sequence
  Description of Artificial Sequence: Synthetic oligonucleotide
cagswmtacggaagtbhccctcctmtcact

SEQ ID NO: 3552 - DNA, 30 bp, Artificial Sequence
  Description of Artificial Sequence: Synthetic oligonucleotide
swmswmtacggaagtagtcctcctwggact

SEQ ID NO: 3553 - DNA, 30 bp, Artificial Sequence
  Description of Artificial Sequence: Synthetic oligonucleotide
cagcagbhcbhcagtagtcctcctwggact

SEQ ID NO: 3554 - DNA, 30 bp, Artificial Sequence
  Description of Artificial Sequence: Synthetic oligonucleotide
  modified_base (14)..(14): a, c, t or g
cagcagbhcggavncagtcctcctwggact

SEQ ID NO: 3555 - DNA, 30 bp, Artificial Sequence
  Description of Artificial Sequence: Synthetic oligonucleotide
cagcagbhcggaagtbhccctcctwggact

SEQ ID NO: 3556 - DNA, 30 bp, Artificial Sequence
  Description of Artificial Sequence: Synthetic oligonucleotide
  modified_base (14)..(14): a, c, t or g
cagcagtacbhcvncagtcctcctwggact

SEQ ID NO: 3557 - DNA, 30 bp, Artificial Sequence
  Description of Artificial Sequence: Synthetic oligonucleotide
cagcagtacbhcagtbhccctcctwggact

SEQ ID NO: 3558 - DNA, 30 bp, Artificial Sequence
  Description of Artificial Sequence: Synthetic oligonucleotide
  modified_base (14)..(14): a, c, t or g
cagcagtacggavncbhccctcctwggact

SEQ ID NO: 3559 - DNA, 30 bp, Artificial Sequence
  Description of Artificial Sequence: Synthetic oligonucleotide
swmcagbhcggaagtagtcctcctwggact

SEQ ID NO: 3560 - DNA, 30 bp, Artificial Sequence
  Description of Artificial Sequence: Synthetic oligonucleotide
swmcagtacbhcagtagtcctcctwggact

SEQ ID NO: 3561 - DNA, 30 bp, Artificial Sequence
  Description of Artificial Sequence: Synthetic oligonucleotide
  modified_base (14)..(14): a, c, t or g
swmcagtacggavncagtcctcctwggact

SEQ ID NO: 3562 - DNA, 30 bp, Artificial Sequence
  Description of Artificial Sequence: Synthetic oligonucleotide
swmcagtacggaagtbhccctcctwggact

SEQ ID NO: 3563 - DNA, 30 bp, Artificial Sequence
  Description of Artificial Sequence: Synthetic oligonucleotide
cagswmbhcggaagtagtcctcctwggact

SEQ ID NO: 3564 - DNA, 30 bp, Artificial Sequence
  Description of Artificial Sequence: Synthetic oligonucleotide
cagswmtacbhcagtagtcctcctwggact

SEQ ID NO: 3565 - DNA, 30 bp, Artificial Sequence
  Description of Artificial Sequence: Synthetic oligonucleotide
  modified_base (14)..(14): a, c, t or g
cagswmtacggavncagtcctcctwggact

SEQ ID NO: 3566 - DNA, 30 bp, Artificial Sequence
  Description of Artificial Sequence: Synthetic oligonucleotide
cagswmtacggaagtbhccctcctwggact

SEQ ID NO: 3567 - DNA, 30 bp, Artificial Sequence
  Description of Artificial Sequence: Synthetic oligonucleotide
cagcagbhcvrmmbctacyctccttwcact

SEQ ID NO: 3568 - DNA, 30 bp, Artificial Sequence
  Description of Artificial Sequence: Synthetic oligonucleotide
cagcagbhcvrmmbctacyctcctmtcact

SEQ ID NO: 3569 - DNA, 30 bp, Artificial Sequence
  Description of Artificial Sequence: Synthetic oligonucleotide
cagcagbhcvrmmbctacyctcctwggact

SEQ ID NO: 3570 - DNA, 30 bp, Artificial Sequence
  Description of Artificial Sequence: Synthetic oligonucleotide
cagcagbhcaatmbcywcyctccttwcact

SEQ ID NO: 3571 - DNA, 30 bp, Artificial Sequence
  Description of Artificial Sequence: Synthetic oligonucleotide
cagcagbhcaatmbcywcyctcctmtcact

SEQ ID NO: 3572 - DNA, 30 bp, Artificial Sequence
  Description of Artificial Sequence: Synthetic oligonucleotide
cagcagbhcaatmbcywcyctcctwggact

SEQ ID NO: 3573 - DNA, 30 bp, Artificial Sequence
  Description of Artificial Sequence: Synthetic oligonucleotide
cagcagbhcvrmagtywcyctccttwcact

SEQ ID NO: 3574 - DNA, 30 bp, Artificial Sequence
  Description of Artificial Sequence: Synthetic oligonucleotide
cagcagbhcvrmagtywcyctcctmtcact

SEQ ID NO: 3575 - DNA, 30 bp, Artificial Sequence
  Description of Artificial Sequence: Synthetic oligonucleotide
cagcagbhcvrmagtywcyctcctwggact

SEQ ID NO: 3576 - DNA, 30 bp, Artificial Sequence
  Description of Artificial Sequence: Synthetic oligonucleotide
cagcagtacvrmmbcywcyctccttwcact

SEQ ID NO: 3577 - DNA, 30 bp, Artificial Sequence
  Description of Artificial Sequence: Synthetic oligonucleotide
cagcagtacvrmmbcywcyctcctmtcact

SEQ ID NO: 3578 - DNA, 30 bp, Artificial Sequence
  Description of Artificial Sequence: Synthetic oligonucleotide
cagcagtacvrmmbcywcyctcctwggact

SEQ ID NO: 3579 - DNA, 30 bp, Artificial Sequence
  Description of Artificial Sequence: Synthetic oligonucleotide
  modified_base (8)..(8): a, c, t or g
  modified_base (10)..(10): a, c, t or g
  modified_base (13)..(13): a, c, t or g
cagcagrnanhcnhcttccctccttwcact

SEQ ID NO: 3580 - DNA, 30 bp, Artificial Sequence
  Description of Artificial Sequence: Synthetic oligonucleotide
  modified_base (8)..(8): a, c, t or g
  modified_base (10)..(10): a, c, t or g
  modified_base (13)..(13): a, c, t or g
cagcagrnanhcnhcttccctcctmtcact

SEQ ID NO: 3581 - DNA, 30 bp, Artificial Sequence
  Description of Artificial Sequence: Synthetic oligonucleotide
  modified_base (8)..(8): a, c, t or g
  modified_base (10)..(10): a, c, t or g
  modified_base (13)..(13): a, c, t or g
cagcagrnanhcnhcttccctcctwggact

SEQ ID NO: 3582 - DNA, 30 bp, Artificial Sequence
  Description of Artificial Sequence: Synthetic oligonucleotide
  modified_base (8)..(8): a, c, t or g
  modified_base (10)..(10): a, c, t or g
cagcagrnanhcagtywccctccttwcact

SEQ ID NO: 3583 - DNA, 30 bp, Artificial Sequence
  Description of Artificial Sequence: Synthetic oligonucleotide
  modified_base (8)..(8): a, c, t or g
  modified_base (10)..(10): a, c, t or g
cagcagrnanhcagtywccctcctmtcact

SEQ ID NO: 3584 - DNA, 30 bp, Artificial Sequence
  Description of Artificial Sequence: Synthetic oligonucleotide
  modified_base (8)..(8): a, c, t or g
  modified_base (10)..(10): a, c, t or g
cagcagrnanhcagtywccctcctwggact

SEQ ID NO: 3585 - DNA, 30 bp, Artificial Sequence
  Description of Artificial Sequence: Synthetic oligonucleotide
  modified_base (8)..(8): a, c, t or g
  modified_base (13)..(13): a, c, t or g
cagcagrnaaatnhcywccctccttwcact

SEQ ID NO: 3586 - DNA, 30 bp, Artificial Sequence
  Description of Artificial Sequence: Synthetic oligonucleotide
  modified_base (8)..(8): a, c, t or g
  modified_base (13)..(13): a, c, t or g
cagcagrnaaatnhcywccctcctmtcact

SEQ ID NO: 3587 - DNA, 30 bp, Artificial Sequence
  Description of Artificial Sequence: Synthetic oligonucleotide
  modified_base (8)..(8): a, c, t or g
  modified_base (13)..(13): a, c, t or g
cagcagrnaaatnhcywccctcctwggact

SEQ ID NO: 3588 - DNA, 30 bp, Artificial Sequence
  Description of Artificial Sequence: Synthetic oligonucleotide
  modified_base (10)..(10): a, c, t or g
  modified_base (13)..(13): a, c, t or g
cagcaggcanhcnhcywccctccttwcact

SEQ ID NO: 3589 - DNA, 30 bp, Artificial Sequence
  Description of Artificial Sequence: Synthetic oligonucleotide
  modified_base (10)..(10): a, c, t or g
  modified_base (13)..(13): a, c, t or g
cagcaggcanhcnhcywccctcctmtcact

SEQ ID NO: 3590 - DNA, 30 bp, Artificial Sequence
  Description of Artificial Sequence: Synthetic oligonucleotide
  modified_base (10)..(10): a, c, t or g
  modified_base (13)..(13): a, c, t or g
cagcaggcanhcnhcywccctcctwggact

SEQ ID NO: 3591 - DNA, 30 bp, Artificial Sequence
  Description of Artificial Sequence: Synthetic oligonucleotide
  modified_base (10)..(10): a, c, t or g
  modified_base (13)..(13): a, c, t or g
cagcagbhcnhcnhcctccctccttwcact

SEQ ID NO: 3592 - DNA, 30 bp, Artificial Sequence
  Description of Artificial Sequence: Synthetic oligonucleotide
  modified_base (10)..(10): a, c, t or g
  modified_base (13)..(13): a, c, t or g
cagcagbhcnhcnhcctccctcctmtcact

SEQ ID NO: 3593 - DNA, 30 bp, Artificial Sequence
  Description of Artificial Sequence: Synthetic oligonucleotide
  modified_base (10)..(10): a, c, t or g
  modified_base (13)..(13): a, c, t or g
cagcagbhcnhcnhcctccctcctwggact

SEQ ID NO: 3594 - DNA, 30 bp, Artificial Sequence
  Description of Artificial Sequence: Synthetic oligonucleotide
  modified_base (10)..(10): a, c, t or g
cagcagbhcnhcaatywccctccttwcact

SEQ ID NO: 3595 - DNA, 30 bp, Artificial Sequence
  Description of Artificial Sequence: Synthetic oligonucleotide
  modified_base (10)..(10): a, c, t or g
cagcagbhcnhcaatywccctcctmtcact

SEQ ID NO: 3596 - DNA, 30 bp, Artificial Sequence
  Description of Artificial Sequence: Synthetic oligonucleotide
  modified_base (10)..(10): a, c, t or g
cagcagbhcnhcaatywccctcctwggact

SEQ ID NO: 3597 - DNA, 30 bp, Artificial Sequence
  Description of Artificial Sequence: Synthetic oligonucleotide
  modified_base (13)..(13): a, c, t or g
cagcagbhcgatnhcywccctccttwcact

SEQ ID NO: 3598 - DNA, 30 bp, Artificial Sequence
  Description of Artificial Sequence: Synthetic oligonucleotide
  modified_base (13)..(13): a, c, t or g
cagcagbhcgatnhcywccctcctmtcact

SEQ ID NO: 3599 - DNA, 30 bp, Artificial Sequence
  Description of Artificial Sequence: Synthetic oligonucleotide
  modified_base (13)..(13): a, c, t or g
cagcagbhcgatnhcywccctcctwggact

SEQ ID NO: 3600 - DNA, 30 bp, Artificial Sequence
  Description of Artificial Sequence: Synthetic oligonucleotide
  modified_base (10)..(10): a, c, t or g
  modified_base (13)..(13): a, c, t or g
cagcagtacnhcnhcywccctccttwcact

SEQ ID NO: 3601 - DNA, 30 bp, Artificial Sequence
  Description of Artificial Sequence: Synthetic oligonucleotide
  modified_base (10)..(10): a, c, t or g
  modified_base (13)..(13): a, c, t or g
cagcagtacnhcnhcywccctcctmtcact

SEQ ID NO: 3602 - DNA, 30 bp, Artificial Sequence
  Description of Artificial Sequence: Synthetic oligonucleotide
  modified_base (10)..(10): a, c, t or g
  modified_base (13)..(13): a, c, t or g
cagcagtacnhcnhcywccctcctwggact

SEQ ID NO: 3603 - DNA, 30 bp, Artificial Sequence
  Description of Artificial Sequence: Synthetic oligonucleotide
  modified_base (8)..(8): a, c, t or g
  modified_base (13)..(13): a, c, t or g
cagcaavnabhcnhcactcctccttwcact

SEQ ID NO: 3604 - DNA, 30 bp, Artificial Sequence
  Description of Artificial Sequence: Synthetic oligonucleotide
  modified_base (8)..(8): a, c, t or g
  modified_base (13)..(13): a, c, t or g
cagcaavnabhcnhcactcctcctmtcact

SEQ ID NO: 3605 - DNA, 30 bp, Artificial Sequence
  Description of Artificial Sequence: Synthetic oligonucleotide
  modified_base (8)..(8): a, c, t or g
  modified_base (13)..(13): a, c, t or g
cagcaavnabhcnhcactcctcctwggact

SEQ ID NO: 3606 - DNA, 30 bp, Artificial Sequence
  Description of Artificial Sequence: Synthetic oligonucleotide
  modified_base (8)..(8): a, c, t or g
cagcaavnabhcagtbhccctccttwcact

SEQ ID NO: 3607 - DNA, 30 bp, Artificial Sequence
  Description of Artificial Sequence: Synthetic oligonucleotide
  modified_base (8)..(8): a, c, t or g
cagcaavnabhcagtbhccctcctmtcact

SEQ ID NO: 3608 - DNA, 30 bp, Artificial Sequence
  Description of Artificial Sequence: Synthetic oligonucleotide
  modified_base (8)..(8): a, c, t or g
cagcaavnabhcagtbhccctcctwggact

SEQ ID NO: 3609 - DNA, 30 bp, Artificial Sequence
  Description of Artificial Sequence: Synthetic oligonucleotide
  modified_base (8)..(8): a, c, t or g
  modified_base (13)..(13): a, c, t or g
cagcaavnatacnhcbhccctccttwcact

SEQ ID NO: 3610 - DNA, 30 bp, Artificial Sequence
  Description of Artificial Sequence: Synthetic oligonucleotide
  modified_base (8)..(8): a, c, t or g
  modified_base (13)..(13): a, c, t or g
cagcaavnatacnhcbhccctcctmtcact

SEQ ID NO: 3611 - DNA, 30 bp, Artificial Sequence
  Description of Artificial Sequence: Synthetic oligonucleotide
  modified_base (8)..(8): a, c, t or g
  modified_base (13)..(13): a, c, t or g
cagcaavnatacnhcbhccctcctwggact

SEQ ID NO: 3612 - DNA, 30 bp, Artificial Sequence
  Description of Artificial Sequence: Synthetic oligonucleotide
  modified_base (13)..(13): a, c, t or g
cagcaaagcbhcnhcbhccctccttwcact

SEQ ID NO: 3613 - DNA, 30 bp, Artificial Sequence
  Description of Artificial Sequence: Synthetic oligonucleotide
  modified_base (13)..(13): a, c, t or g
cagcaaagcbhcnhcbhccctcctmtcact

SEQ ID NO: 3614 - DNA, 30 bp, Artificial Sequence
  Description of Artificial Sequence: Synthetic oligonucleotide
  modified_base (13)..(13): a, c, t or g
cagcaaagcbhcnhcbhccctcctwggact

SEQ ID NO: 3615 - DNA, 30 bp, Artificial Sequence
  Description of Artificial Sequence: Synthetic oligonucleotide
  modified_base (8)..(8): a, c, t or g
  modified_base (11)..(11): a, c, t or g
atgcagvnamnasrmactcctccttwcact

SEQ ID NO: 3616 - DNA, 30 bp, Artificial Sequence
  Description of Artificial Sequence: Synthetic oligonucleotide
  modified_base (8)..(8): a, c, t or g
  modified_base (11)..(11): a, c, t or g
atgcagvnamnasrmactcctcctmtcact

SEQ ID NO: 3617 - DNA, 30 bp, Artificial Sequence
  Description of Artificial Sequence: Synthetic oligonucleotide
  modified_base (8)..(8): a, c, t or g
  modified_base (11)..(11): a, c, t or g
atgcagvnamnasrmactcctcctwggact

SEQ ID NO: 3618 - DNA, 30 bp, Artificial Sequence
  Description of Artificial Sequence: Synthetic oligonucleotide
  modified_base (8)..(8): a, c, t or g
  modified_base (11)..(11): a, c, t or g
atgcagvnamnacagvbccctccttwcact

SEQ ID NO: 3619 - DNA, 30 bp, Artificial Sequence
  Description of Artificial Sequence: Synthetic oligonucleotide
  modified_base (8)..(8): a, c, t or g
  modified_base (11)..(11): a, c, t or g
atgcagvnamnacagvbccctcctmtcact

SEQ ID NO: 3620 - DNA, 30 bp, Artificial Sequence
  Description of Artificial Sequence: Synthetic oligonucleotide
  modified_base (8)..(8): a, c, t or g
  modified_base (11)..(11): a, c, t or g
atgcagvnamnacagvbccctcctwggact

SEQ ID NO: 3621 - DNA, 30 bp, Artificial Sequence
  Description of Artificial Sequence: Synthetic oligonucleotide
  modified_base (8)..(8): a, c, t or g
atgcagvnactcsrmvbccctccttwcact

SEQ ID NO: 3622 - DNA, 30 bp, Artificial Sequence
  Description of Artificial Sequence: Synthetic oligonucleotide
  modified_base (8)..(8): a, c, t or g
atgcagvnactcsrmvbccctcctmtcact

SEQ ID NO: 3623 - DNA, 30 bp, Artificial Sequence
  Description of Artificial Sequence: Synthetic oligonucleotide
  modified_base (8)..(8): a, c, t or g
atgcagvnactcsrmvbccctcctwggact

SEQ ID NO: 3624 - DNA, 30 bp, Artificial Sequence
  Description of Artificial Sequence: Synthetic oligonucleotide
  modified_base (11)..(11): a, c, t or g
atgcaggcamnasrmvbccctccttwcact

SEQ ID NO: 3625 - DNA, 30 bp, Artificial Sequence
  Description of Artificial Sequence: Synthetic oligonucleotide
  modified_base (11)..(11): a, c, t or g
atgcaggcamnasrmvbccctcctmtcact

SEQ ID NO: 3626 - DNA, 30 bp, Artificial Sequence
  Description of Artificial Sequence: Synthetic oligonucleotide
  modified_base (11)..(11): a, c, t or g
atgcaggcamnasrmvbccctcctwggact

SEQ ID NO: 3627 - DNA, 30 bp, Artificial Sequence
  Description of Artificial Sequence: Synthetic oligonucleotide
  modified_base (10)..(10): a, c, t or g
  modified_base (13)..(13): a, c, t or g
cagcagbhcnhcnhctggcctccttwcact

SEQ ID NO: 3628 - DNA, 30 bp, Artificial Sequence
  Description of Artificial Sequence: Synthetic oligonucleotide
  modified_base (10)..(10): a, c, t or g
  modified_base (13)..(13): a, c, t or g
cagcagbhcnhcnhctggcctcctmtcact

SEQ ID NO: 3629 - DNA, 30 bp, Artificial Sequence
  Description of Artificial Sequence: Synthetic oligonucleotide
  modified_base (10)..(10): a, c, t or g
  modified_base (13)..(13): a, c, t or g
cagcagbhcnhcnhctggcctcctwggact

SEQ ID NO: 3630 - DNA, 30 bp, Artificial Sequence
  Description of Artificial Sequence: Synthetic oligonucleotide
  modified_base (13)..(13): a, c, t or g
cagcagbhcagtnhcywccctccttwcact

SEQ ID NO: 3631 - DNA, 30 bp, Artificial Sequence
  Description of Artificial Sequence: Synthetic oligonucleotide
  modified_base (13)..(13): a, c, t or g
cagcagbhcagtnhcywccctcctmtcact

SEQ ID NO: 3632 - DNA, 30 bp, Artificial Sequence
  Description of Artificial Sequence: Synthetic oligonucleotide
  modified_base (13)..(13): a, c, t or g
cagcagbhcagtnhcywccctcctwggact

SEQ ID NO: 3633 - DNA, 30 bp, Artificial Sequence
  Description of Artificial Sequence: Synthetic oligonucleotide
  modified_base (10)..(10): a, c, t or g
  modified_base (13)..(13): a, c, t or g
cagcagaganhcnhcywccctccttwcact

SEQ ID NO: 3634 - DNA, 30 bp, Artificial Sequence
  Description of Artificial Sequence: Synthetic oligonucleotide
  modified_base (10)..(10): a, c, t or g
  modified_base (13)..(13): a, c, t or g
cagcagaganhcnhcywccctcctmtcact

SEQ ID NO: 3635 - DNA, 30 bp, Artificial Sequence
  Description of Artificial Sequence: Synthetic oligonucleotide
  modified_base (10)..(10): a, c, t or g
  modified_base (13)..(13): a, c, t or g
cagcagaganhcnhcywccctcctwggact

SEQ ID NO: 3636 - DNA, 30 bp, Artificial Sequence
  Description of Artificial Sequence: Synthetic oligonucleotide
  modified_base (13)..(13): a, c, t or g
cagcagbhcaatnhcywccctccttwcact

SEQ ID NO: 3637 - DNA, 30 bp, Artificial Sequence
  Description of Artificial Sequence: Synthetic oligonucleotide
  modified_base (13)..(13): a, c, t or g
cagcagbhcaatnhcywccctcctmtcact

SEQ ID NO: 3638 - DNA, 30 bp, Artificial Sequence
  Description of Artificial Sequence: Synthetic oligonucleotide
  modified_base (13)..(13): a, c, t or g
cagcagbhcaatnhcywccctcctwggact

SEQ ID NO: 3639 - DNA, 30 bp, Artificial Sequence
  Description of Artificial Sequence: Synthetic oligonucleotide
  modified_base (14)..(14): a, c, t or g
cagcagbhcbhcvncagtcctccttwcact

SEQ ID NO: 3640 - DNA, 30 bp, Artificial Sequence
  Description of Artificial Sequence: Synthetic oligonucleotide
  modified_base (14)..(14): a, c, t or g
cagcagbhcbhcvncagtcctcctmtcact

SEQ ID NO: 3641 - DNA, 30 bp, Artificial Sequence
  Description of Artificial Sequence: Synthetic oligonucleotide
  modified_base (14)..(14): a, c, t or g
cagcagbhcbhcvncagtcctcctwggact

SEQ ID NO: 3642 - DNA, 30 bp, Artificial Sequence
  Description of Artificial Sequence: Synthetic oligonucleotide
cagcagbhcbhcagtbhccctccttwcact

SEQ ID NO: 3643 - DNA, 30 bp, Artificial Sequence
  Description of Artificial Sequence: Synthetic oligonucleotide
cagcagbhcbhcagtbhccctcctmtcact

SEQ ID NO: 3644 - DNA, 30 bp, Artificial Sequence
  Description of Artificial Sequence: Synthetic oligonucleotide
cagcagbhcbhcagtbhccctcctwggact

SEQ ID NO: 3645 - DNA, 30 bp, Artificial Sequence
  Description of Artificial Sequence: Synthetic oligonucleotide
  modified_base (14)..(14): a, c, t or g
cagcagbhcggavncbhccctccttwcact

SEQ ID NO: 3646 - DNA, 30 bp, Artificial Sequence
  Description of Artificial Sequence: Synthetic oligonucleotide
  modified_base (14)..(14): a, c, t or g
cagcagbhcggavncbhccctcctmtcact

SEQ ID NO: 3647 - DNA, 30 bp, Artificial Sequence
  Description of Artificial Sequence: Synthetic oligonucleotide
  modified_base (14)..(14): a, c, t or g
cagcagbhcggavncbhccctcctwggact

SEQ ID NO: 3648 - DNA, 30 bp, Artificial Sequence
  Description of Artificial Sequence: Synthetic oligonucleotide
  modified_base (14)..(14): a, c, t or g
cagcagtacbhcvncbhccctccttwcact

SEQ ID NO: 3649 - DNA, 30 bp, Artificial Sequence
  Description of Artificial Sequence: Synthetic oligonucleotide
  modified_base (14)..(14): a, c, t or g
cagcagtacbhcvncbhccctcctmtcact

SEQ ID NO: 3650 - DNA, 30 bp, Artificial Sequence
  Description of Artificial Sequence: Synthetic oligonucleotide
  modified_base (14)..(14): a, c, t or g
cagcagtacbhcvncbhccctcctwggact

SEQ ID NO: 3651 - DNA, 30 bp, Artificial Sequence
  Description of Artificial Sequence: Synthetic oligonucleotide
  modified_base (13)..(13): a, c, t or g
cagcagbhcbhcnhcactcctccttwcact

SEQ ID NO: 3652 - DNA, 30 bp, Artificial Sequence
  Description of Artificial Sequence: Synthetic oligonucleotide
  modified_base (13)..(13): a, c, t or g
cagcagbhcbhcnhcactcctcctmtcact

SEQ ID NO: 3653 - DNA, 30 bp, Artificial Sequence
  Description of Artificial Sequence: Synthetic oligonucleotide
  modified_base (13)..(13): a, c, t or g
cagcagbhcbhcnhcactcctcctwggact

SEQ ID NO: 3654 - DNA, 30 bp, Artificial Sequence
  Description of Artificial Sequence: Synthetic oligonucleotide
  modified_base (13)..(13): a, c, t or g
cagcagbhctacnhcbhccctccttwcact

SEQ ID NO: 3655 - DNA, 30 bp, Artificial Sequence
  Description of Artificial Sequence: Synthetic oligonucleotide
  modified_base (13)..(13): a, c, t or g
cagcagbhctacnhcbhccctcctmtcact

SEQ ID NO: 3656 - DNA, 30 bp, Artificial Sequence
  Description of Artificial Sequence: Synthetic oligonucleotide
  modified_base (13)..(13): a, c, t or g
cagcagbhctacnhcbhccctcctwggact

SEQ ID NO: 3657 - DNA, 30 bp, Artificial Sequence
  Description of Artificial Sequence: Synthetic oligonucleotide
  modified_base (13)..(13): a, c, t or g
cagcagtacbhcnhcbhccctccttwcact

SEQ ID NO: 3658 - DNA, 30 bp, Artificial Sequence
  Description of Artificial Sequence: Synthetic oligonucleotide
  modified_base (13)..(13): a, c, t or g
cagcagtacbhcnhcbhccctcctmtcact

SEQ ID NO: 3659 - DNA, 30 bp, Artificial Sequence
  Description of Artificial Sequence: Synthetic oligonucleotide
  modified_base (13)..(13): a, c, t or g
cagcagtacbhcnhcbhccctcctwggact

SEQ ID NO: 3660 - protein, 8 aa, Artificial Sequence
  Description of Artificial Sequence: Synthetic peptide
RTAHHFDY

SEQ ID NO: 3661 - protein, 9 aa, Artificial Sequence
  Description of Artificial Sequence: Synthetic peptide
VGIVGAASY

SEQ ID NO: 3662 - protein, 10 aa, Artificial Sequence
  Description of Artificial Sequence: Synthetic peptide
DRYSGHDLGY

SEQ ID NO: 3663 - protein, 12 aa, Artificial Sequence
  Description of Artificial Sequence: Synthetic peptide
GIAAADSNWLDP

SEQ ID NO: 3664 - protein, 16 aa, Artificial Sequence
  Description of Artificial Sequence: Synthetic peptide
ERTINWGWGGVYAFDI

SEQ ID NO: 3665 - protein, 4 aa, Artificial Sequence
  Description of Artificial Sequence: Synthetic peptide
EAGG

SEQ ID NO: 3666 - protein, 4 aa, Artificial Sequence
  Description of Artificial Sequence: Synthetic peptide
DAGG

SEQ ID NO: 3667 - protein, 4 aa, Artificial Sequence
  Description of Artificial Sequence: Synthetic peptide
GAGG

SEQ ID NO: 3668 - protein, 4 aa, Artificial Sequence
  Description of Artificial Sequence: Synthetic peptide
EGAG

SEQ ID NO: 3669 - protein, 4 aa, Artificial Sequence
  Description of Artificial Sequence: Synthetic peptide
DGAG

SEQ ID NO: 3670 - protein, 4 aa, Artificial Sequence
  Description of Artificial Sequence: Synthetic peptide
GGAG

SEQ ID NO: 3671 - protein, 4 aa, Artificial Sequence
  Description of Artificial Sequence: Synthetic peptide
EGGA

SEQ ID NO: 3672 - protein, 4 aa, Artificial Sequence
  Description of Artificial Sequence: Synthetic peptide
DGGA

SEQ ID NO: 3673 - protein, 4 aa, Artificial Sequence
  Description of Artificial Sequence: Synthetic peptide
GGGA

SEQ ID NO: 3674 - protein, 4 aa, Artificial Sequence
  Description of Artificial Sequence: Synthetic peptide
EGGG

SEQ ID NO: 3675 - protein, 4 aa, Artificial Sequence
  Description of Artificial Sequence: Synthetic peptide
DGGG

SEQ ID NO: 3676 - protein, 4 aa, Artificial Sequence
  Description of Artificial Sequence: Synthetic peptide
GGGG

SEQ ID NO: 3677 - protein, 4 aa, Artificial Sequence
  Description of Artificial Sequence: Synthetic peptide
EGGL

SEQ ID NO: 3678 - protein, 4 aa, Artificial Sequence
  Description of Artificial Sequence: Synthetic peptide
DGGL

SEQ ID NO: 3679 - protein, 4 aa, Artificial Sequence
  Description of Artificial Sequence: Synthetic peptide
GGGL

SEQ ID NO: 3680 - protein, 4 aa, Artificial Sequence
  Description of Artificial Sequence: Synthetic peptide
EGGP

SEQ ID NO: 3681 - protein, 4 aa, Artificial Sequence
  Description of Artificial Sequence: Synthetic peptide
DGGP

SEQ ID NO: 3682 - protein, 4 aa, Artificial Sequence
  Description of Artificial Sequence: Synthetic peptide
GGGP

SEQ ID NO: 3683 - protein, 4 aa, Artificial Sequence
  Description of Artificial Sequence: Synthetic peptide
EGGR

SEQ ID NO: 3684 - protein, 4 aa, Artificial Sequence
  Description of Artificial Sequence: Synthetic peptide
DGGR

SEQ ID NO: 3685 - protein, 4 aa, Artificial Sequence
  Description of Artificial Sequence: Synthetic peptide
GGGR

SEQ ID NO: 3686 - protein, 4 aa, Artificial Sequence
  Description of Artificial Sequence: Synthetic peptide
EGGS

SEQ ID NO: 3687 - protein, 4 aa, Artificial Sequence
  Description of Artificial Sequence: Synthetic peptide
DGGS

SEQ ID NO: 3688 - protein, 4 aa, Artificial Sequence
  Description of Artificial Sequence: Synthetic peptide
GGGS

SEQ ID NO: 3689 - protein, 4 aa, Artificial Sequence
  Description of Artificial Sequence: Synthetic peptide
EGGT

SEQ ID NO: 3690 - protein, 4 aa, Artificial Sequence
  Description of Artificial Sequence: Synthetic peptide
DGGT

SEQ ID NO: 3691 - protein, 4 aa, Artificial Sequence
  Description of Artificial Sequence: Synthetic peptide
GGGT

SEQ ID NO: 3692 - protein, 4 aa, Artificial Sequence
  Description of Artificial Sequence: Synthetic peptide
EGGV

SEQ ID NO: 3693 - protein, 4 aa, Artificial Sequence
  Description of Artificial Sequence: Synthetic peptide
DGGV

SEQ ID NO: 3694 - protein, 4 aa, Artificial Sequence
  Description of Artificial Sequence: Synthetic peptide
GGGV

SEQ ID NO: 3695 - protein, 4 aa, Artificial Sequence
  Description of Artificial Sequence: Synthetic peptide
EGLG

SEQ ID NO: 3696 - protein, 4 aa, Artificial Sequence
  Description of Artificial Sequence: Synthetic peptide
DGLG

SEQ ID NO: 3697 - protein, 4 aa, Artificial Sequence
  Description of Artificial Sequence: Synthetic peptide
GGLG

SEQ ID NO: 3698 - protein, 4 aa, Artificial Sequence
  Description of Artificial Sequence: Synthetic peptide
EGPG

SEQ ID NO: 3699 - protein, 4 aa, Artificial Sequence
  Description of Artificial Sequence: Synthetic peptide
DGPG

SEQ ID NO: 3700 - protein, 4 aa, Artificial Sequence
  Description of Artificial Sequence: Synthetic peptide
GGPG

SEQ ID NO: 3701 - protein, 4 aa, Artificial Sequence
  Description of Artificial Sequence: Synthetic peptide
EGRG

SEQ ID NO: 3702 - protein, 4 aa, Artificial Sequence
  Description of Artificial Sequence: Synthetic peptide
DGRG

SEQ ID NO: 3703 - protein, 4 aa, Artificial Sequence
  Description of Artificial Sequence: Synthetic peptide
GGRG

SEQ ID NO: 3704 - protein, 4 aa, Artificial Sequence
  Description of Artificial Sequence: Synthetic peptide
EGSG

SEQ ID NO: 3705 - protein, 4 aa, Artificial Sequence
  Description of Artificial Sequence: Synthetic peptide
DGSG

SEQ ID NO: 3706 - protein, 4 aa, Artificial Sequence
  Description of Artificial Sequence: Synthetic peptide
GGSG

SEQ ID NO: 3707 - protein, 4 aa, Artificial Sequence
  Description of Artificial Sequence: Synthetic peptide
EGTG

SEQ ID NO: 3708 - protein, 4 aa, Artificial Sequence
  Description of Artificial Sequence: Synthetic peptide
DGTG

SEQ ID NO: 3709 - protein, 4 aa, Artificial Sequence
  Description of Artificial Sequence: Synthetic peptide
GGTG

SEQ ID NO: 3710 - protein, 4 aa, Artificial Sequence
  Description of Artificial Sequence: Synthetic peptide
EGVG

SEQ ID NO: 3711 - protein, 4 aa, Artificial Sequence
  Description of Artificial Sequence: Synthetic peptide
DGVG

SEQ ID NO: 3712 - protein, 4 aa, Artificial Sequence
  Description of Artificial Sequence: Synthetic peptide
GGVG

SEQ ID NO: 3713 - protein, 4 aa, Artificial Sequence
  Description of Artificial Sequence: Synthetic peptide
ELGG

SEQ ID NO: 3714 - protein, 4 aa, Artificial Sequence
  Description of Artificial Sequence: Synthetic peptide
DLGG

SEQ ID NO: 3715 - protein, 4 aa, Artificial Sequence
  Description of Artificial Sequence: Synthetic peptide
GLGG

SEQ ID NO: 3716 - protein, 4 aa, Artificial Sequence
  Description of Artificial Sequence: Synthetic peptide
EPGG

SEQ ID NO: 3717 - protein, 4 aa, Artificial Sequence
  Description of Artificial Sequence: Synthetic peptide
DPGG

SEQ ID NO: 3718 - protein, 4 aa, Artificial Sequence
  Description of Artificial Sequence: Synthetic peptide
GPGG

SEQ ID NO: 3719 - protein, 4 aa, Artificial Sequence
  Description of Artificial Sequence: Synthetic peptide
ERGG

SEQ ID NO: 3720 - protein, 4 aa, Artificial Sequence
  Description of Artificial Sequence: Synthetic peptide
DRGG

SEQ ID NO: 3721 - protein, 4 aa, Artificial Sequence
  Description of Artificial Sequence: Synthetic peptide
GRGG

SEQ ID NO: 3722 - protein, 4 aa, Artificial Sequence
  Description of Artificial Sequence: Synthetic peptide
ESGG

SEQ ID NO: 3723 - protein, 4 aa, Artificial Sequence
  Description of Artificial Sequence: Synthetic peptide
DSGG

SEQ ID NO: 3724 - protein, 4 aa, Artificial Sequence
  Description of Artificial Sequence: Synthetic peptide
GSGG

SEQ ID NO: 3725 - protein, 4 aa, Artificial Sequence
  Description of Artificial Sequence: Synthetic peptide
ETGG

SEQ ID NO: 3726 - protein, 4 aa, Artificial Sequence
  Description of Artificial Sequence: Synthetic peptide
DTGG

SEQ ID NO: 3727 - protein, 4 aa, Artificial Sequence
  Description of Artificial Sequence: Synthetic peptide
GTGG

SEQ ID NO: 3728 - protein, 4 aa, Artificial Sequence
  Description of Artificial Sequence: Synthetic peptide
EVGG

SEQ ID NO: 3729 - protein, 4 aa, Artificial Sequence
  Description of Artificial Sequence: Synthetic peptide
DVGG

SEQ ID NO: 3730 - protein, 4 aa, Artificial Sequence
  Description of Artificial Sequence: Synthetic peptide
GVGG

SEQ ID NO: 3731 - protein, 6 aa, Artificial Sequence
  Description of Artificial Sequence: Synthetic peptide
GTTGTT

SEQ ID NO: 3732 - protein, 5 aa, Artificial Sequence
  Description of Artificial Sequence: Synthetic peptide
GTTGT

SEQ ID NO: 3733 - protein, 5 aa, Artificial Sequence
  Description of Artificial Sequence: Synthetic peptide
TTGTT

SEQ ID NO: 3734 - protein, 4 aa, Artificial Sequence
  Description of Artificial Sequence: Synthetic peptide
GTTG

SEQ ID NO: 3735 - protein, 4 aa, Artificial Sequence
  Description of Artificial Sequence: Synthetic peptide
TTGT

SEQ ID NO: 3736 - protein, 4 aa, Artificial Sequence
  Description of Artificial Sequence: Synthetic peptide
TGTT

SEQ ID NO: 3737 - protein, 5 aa, Artificial Sequence
  Description of Artificial Sequence: Synthetic peptide
VQLER

SEQ ID NO: 3738 - protein, 4 aa, Artificial Sequence
  Description of Artificial Sequence: Synthetic peptide
VQLE

SEQ ID NO: 3739 - protein, 4 aa, Artificial Sequence
  Description of Artificial Sequence: Synthetic peptide
QLER

SEQ ID NO: 3740 - protein, 5 aa, Artificial Sequence
  Description of Artificial Sequence: Synthetic peptide
YNWND

SEQ ID NO: 3741 - protein, 4 aa, Artificial Sequence
  Description of Artificial Sequence: Synthetic peptide
YNWN

SEQ ID NO: 3742 - protein, 4 aa, Artificial Sequence
  Description of Artificial Sequence: Synthetic peptide
NWND

SEQ ID NO: 3743 - protein, 6 aa, Artificial Sequence
  Description of Artificial Sequence: Synthetic peptide
GITGTT

SEQ ID NO: 3744 - protein, 5 aa, Artificial Sequence
  Description of Artificial Sequence: Synthetic peptide
GITGT

SEQ ID NO: 3745 - protein, 5 aa, Artificial Sequence
  Description of Artificial Sequence: Synthetic peptide
ITGTT

SEQ ID NO: 3746 - protein, 4 aa, Artificial Sequence
  Description of Artificial Sequence: Synthetic peptide
GITG

SEQ ID NO: 3747 - protein, 4 aa, Artificial Sequence
  Description of Artificial Sequence: Synthetic peptide
ITGT

SEQ ID NO: 3748 - protein, 7 aa, Artificial Sequence
  Description of Artificial Sequence: Synthetic peptide
GIVGATT

SEQ ID NO: 3749 - protein, 6 aa, Artificial Sequence
  Description of Artificial Sequence: Synthetic peptide
GIVGAT

SEQ ID NO: 3750 - protein, 6 aa, Artificial Sequence
  Description of Artificial Sequence: Synthetic peptide
IVGATT

SEQ ID NO: 3751 - protein, 5 aa, Artificial Sequence
  Description of Artificial Sequence: Synthetic peptide
GIVGA

SEQ ID NO: 3752 - protein, 5 aa, Artificial Sequence
  Description of Artificial Sequence: Synthetic peptide
IVGAT

SEQ ID NO: 3753 - protein, 5 aa, Artificial Sequence
  Description of Artificial Sequence: Synthetic peptide
VGATT

SEQ ID NO: 3754 - protein, 4 aa, Artificial Sequence
  Description of Artificial Sequence: Synthetic peptide
GIVG

SEQ ID NO: 3755 - protein, 4 aa, Artificial Sequence
  Description of Artificial Sequence: Synthetic peptide
IVGA

SEQ ID NO: 3756 - protein, 4 aa, Artificial Sequence
  Description of Artificial Sequence: Synthetic peptide
VGAT

SEQ ID NO: 3757 - protein, 4 aa, Artificial Sequence
  Description of Artificial Sequence: Synthetic peptide
GATT

SEQ ID NO: 3758 - protein, 4 aa, Artificial Sequence
  Description of Artificial Sequence: Synthetic peptide
WELL

SEQ ID NO: 3759 - protein, 6 aa, Artificial Sequence
  Description of Artificial Sequence: Synthetic peptide
YSGSYY

SEQ ID NO: 3760 - protein, 5 aa, Artificial Sequence
  Description of Artificial Sequence: Synthetic peptide
YSGSY

SEQ ID NO: 3761 - protein, 5 aa, Artificial Sequence
  Description of Artificial Sequence: Synthetic peptide
SGSYY

SEQ ID NO: 3762 - protein, 4 aa, Artificial Sequence
  Description of Artificial Sequence: Synthetic peptide
YSGS

SEQ ID NO: 3763 - protein, 4 aa, Artificial Sequence
  Description of Artificial Sequence: Synthetic peptide
SGSY

SEQ ID NO: 3764 - protein, 4 aa, Artificial Sequence
  Description of Artificial Sequence: Synthetic peptide
GSYY

SEQ ID NO: 3765 - protein, 5 aa, Artificial Sequence
  Description of Artificial Sequence: Synthetic peptide
YNWNY

SEQ ID NO: 3766 - protein, 4 aa, Artificial Sequence
  Description of Artificial Sequence: Synthetic peptide
NWNY

SEQ ID NO: 3767 - protein, 10 aa, Artificial Sequence
  Description of Artificial Sequence: Synthetic peptide
GYCSGGSCYS

SEQ ID NO: 3768 - protein, 9 aa, Artificial Sequence
  Description of Artificial Sequence: Synthetic peptide
GYCSGGSCY

SEQ ID NO: 3769 - protein, 9 aa, Artificial Sequence
  Description of Artificial Sequence: Synthetic peptide
YCSGGSCYS

SEQ ID NO: 3770 - protein, 8 aa, Artificial Sequence
  Description of Artificial Sequence: Synthetic peptide
GYCSGGSC

SEQ ID NO: 3771 - protein, 8 aa, Artificial Sequence
  Description of Artificial Sequence: Synthetic peptide
YCSGGSCY

SEQ ID NO: 3772 - protein, 8 aa, Artificial Sequence
  Description of Artificial Sequence: Synthetic peptide
CSGGSCYS

SEQ ID NO: 3773 - protein, 7 aa, Artificial Sequence
  Description of Artificial Sequence: Synthetic peptide
YCSGGSC

SEQ ID NO: 3774 - protein, 7 aa, Artificial Sequence
  Description of Artificial Sequence: Synthetic peptide
CSGGSCY

SEQ ID NO: 3775 - protein, 6 aa, Artificial Sequence
  Description of Artificial Sequence: Synthetic peptide
CSGGSC

SEQ ID NO: 3776 - protein, 4 aa, Artificial Sequence
  Description of Artificial Sequence: Synthetic peptide
SGGS

SEQ ID NO: 3777 - protein, 10 aa, Artificial Sequence
  Description of Artificial Sequence: Synthetic peptide
DIVVVVAATP

SEQ ID NO: 3778 - protein, 9 aa, Artificial Sequence
  Description of Artificial Sequence: Synthetic peptide
DIVVVVAAT

SEQ ID NO: 3779 - protein, 9 aa, Artificial Sequence
  Description of Artificial Sequence: Synthetic peptide
IVVVVAATP

SEQ ID NO: 3780 - protein, 8 aa, Artificial Sequence
  Description of Artificial Sequence: Synthetic peptide
DIVVVVAA

SEQ ID NO: 3781 - protein, 8 aa, Artificial Sequence
  Description of Artificial Sequence: Synthetic peptide
IVVVVAAT

SEQ ID NO: 3782 - protein, 8 aa, Artificial Sequence
  Description of Artificial Sequence: Synthetic peptide
VVVVAATP

SEQ ID NO: 3783 - protein, 7 aa, Artificial Sequence
  Description of Artificial Sequence: Synthetic peptide
DIVVVVA

SEQ ID NO: 3784 - protein, 7 aa, Artificial Sequence
  Description of Artificial Sequence: Synthetic peptide
IVVVVAA

SEQ ID NO: 3785 - protein, 7 aa, Artificial Sequence
  Description of Artificial Sequence: Synthetic peptide
VVVVAAT

SEQ ID NO: 3786 - protein, 7 aa, Artificial Sequence
  Description of Artificial Sequence: Synthetic peptide
VVVAATP

SEQ ID NO: 3787 - protein, 6 aa, Artificial Sequence
  Description of Artificial Sequence: Synthetic peptide
DIVVVV

SEQ ID NO: 3788 - protein, 6 aa, Artificial Sequence
  Description of Artificial Sequence: Synthetic peptide
IVVVVA

SEQ ID NO: 3789 - protein, 6 aa, Artificial Sequence
  Description of Artificial Sequence: Synthetic peptide
VVVVAA

SEQ ID NO: 3790 - protein, 6 aa, Artificial Sequence
  Description of Artificial Sequence: Synthetic peptide
VVVAAT

SEQ ID NO: 3791 - protein, 6 aa, Artificial Sequence
  Description of Artificial Sequence: Synthetic peptide
VVAATP

SEQ ID NO: 3792 - protein, 5 aa, Artificial Sequence
  Description of Artificial Sequence: Synthetic peptide
DIVVV

SEQ ID NO: 3793 - protein, 5 aa, Artificial Sequence
  Description of Artificial Sequence: Synthetic peptide
IVVVV

SEQ ID NO: 3794 - protein, 5 aa, Artificial Sequence
  Description of Artificial Sequence: Synthetic peptide
VVVVA

SEQ ID NO: 3795 - protein, 5 aa, Artificial Sequence
  Description of Artificial Sequence: Synthetic peptide
VVVAA

SEQ ID NO: 3796 - protein, 5 aa, Artificial Sequence
  Description of Artificial Sequence: Synthetic peptide
VVAAT

SEQ ID NO: 3797 - protein, 5 aa, Artificial Sequence
  Description of Artificial Sequence: Synthetic peptide
VAATP

SEQ ID NO: 3798 - protein, 4 aa, Artificial Sequence
  Description of Artificial Sequence: Synthetic peptide
DIVV

SEQ ID NO: 3799 - protein, 4 aa, Artificial Sequence
  Description of Artificial Sequence: Synthetic peptide
IVVV

SEQ ID NO: 3800 - protein, 4 aa, Artificial Sequence
  Description of Artificial Sequence: Synthetic peptide
VVVV

SEQ ID NO: 3801 - protein, 4 aa, Artificial Sequence
  Description of Artificial Sequence: Synthetic peptide
VVVA

SEQ ID NO: 3802 - protein, 4 aa, Artificial Sequence
  Description of Artificial Sequence: Synthetic peptide
VVAA

SEQ ID NO: 3803 - protein, 4 aa, Artificial Sequence
  Description of Artificial Sequence: Synthetic peptide
VAAT

SEQ ID NO: 3804 - protein, 4 aa, Artificial Sequence
  Description of Artificial Sequence: Synthetic peptide
AATP

SEQ ID NO: 3805 - protein, 4 aa, Artificial Sequence
  Description of Artificial Sequence: Synthetic peptide
YQLL

SEQ ID NO: 3806 - protein, 10 aa, Artificial Sequence
  Description of Artificial Sequence: Synthetic peptide
GYCSSTSCYA

SEQ ID NO: 3807 - protein, 9 aa, Artificial Sequence
  Description of Artificial Sequence: Synthetic peptide
GYCSSTSCY

SEQ ID NO: 3808 - protein, 9 aa, Artificial Sequence
  Description of Artificial Sequence: Synthetic peptide
YCSSTSCYA

SEQ ID NO: 3809 - protein, 8 aa, Artificial Sequence
  Description of Artificial Sequence: Synthetic peptide
GYCSSTSC

SEQ ID NO: 3810 - protein, 8 aa, Artificial Sequence
  Description of Artificial Sequence: Synthetic peptide
YCSSTSCY

SEQ ID NO: 3811 - protein, 8 aa, Artificial Sequence
  Description of Artificial Sequence: Synthetic peptide
CSSTSCYA

SEQ ID NO: 3812 - protein, 7 aa, Artificial Sequence
  Description of Artificial Sequence: Synthetic peptide
YCSSTSC

SEQ ID NO: 3813 - protein, 7 aa, Artificial Sequence
  Description of Artificial Sequence: Synthetic peptide
CSSTSCY

SEQ ID NO: 3814 - protein, 6 aa, Artificial Sequence
  Description of Artificial Sequence: Synthetic peptide
CSSTSC

SEQ ID NO: 3815 - protein, 4 aa, Artificial Sequence
  Description of Artificial Sequence: Synthetic peptide
SSTS

SEQ ID NO: 3816 - protein, 10 aa, Artificial Sequence
  Description of Artificial Sequence: Synthetic peptide
DIVVVPAAMP

SEQ ID NO: 3817 - protein, 9 aa, Artificial Sequence
  Description of Artificial Sequence: Synthetic peptide
DIVVVPAAM

SEQ ID NO: 3818 - protein, 9 aa, Artificial Sequence
  Description of Artificial Sequence: Synthetic peptide
IVVVPAAMP

SEQ ID NO: 3819 - protein, 8 aa, Artificial Sequence
  Description of Artificial Sequence: Synthetic peptide
DIVVVPAA

SEQ ID NO: 3820 - protein, 8 aa, Artificial Sequence
  Description of Artificial Sequence: Synthetic peptide
IVVVPAAM

SEQ ID NO: 3821 - protein, 8 aa, Artificial Sequence
  Description of Artificial Sequence: Synthetic peptide
VVVPAAMP

SEQ ID NO: 3822 - protein, 7 aa, Artificial Sequence
  Description of Artificial Sequence: Synthetic peptide
DIVVVPA

SEQ ID NO: 3823 - protein, 7 aa, Artificial Sequence
  Description of Artificial Sequence: Synthetic peptide
IVVVPAA

SEQ ID NO: 3824 - protein, 7 aa, Artificial Sequence
  Description of Artificial Sequence: Synthetic peptide
VVVPAAM

SEQ ID NO: 3825 - protein, 7 aa, Artificial Sequence
  Description of Artificial Sequence: Synthetic peptide
VVPAAMP

SEQ ID NO: 3826 - protein, 6 aa, Artificial Sequence
  Description of Artificial Sequence: Synthetic peptide
DIVVVP

SEQ ID NO: 3827 - protein, 6 aa, Artificial Sequence
  Description of Artificial Sequence: Synthetic peptide
IVVVPA

SEQ ID NO: 3828 - protein, 6 aa, Artificial Sequence
  Description of Artificial Sequence: Synthetic peptide
VVVPAA

SEQ ID NO: 3829 - protein, 6 aa, Artificial Sequence
  Description of Artificial Sequence: Synthetic peptide
VVPAAM

SEQ ID NO: 3830 - protein, 6 aa, Artificial Sequence
  Description of Artificial Sequence: Synthetic peptide
VPAAMP

SEQ ID NO: 3831 - protein, 5 aa, Artificial Sequence
  Description of Artificial Sequence: Synthetic peptide
IVVVP

SEQ ID NO: 3832 - protein, 5 aa, Artificial Sequence
  Description of Artificial Sequence: Synthetic peptide
VVVPA

SEQ ID NO: 3833 - protein, 5 aa, Artificial Sequence
  Description of Artificial Sequence: Synthetic peptide
VVPAA

SEQ ID NO: 3834 - protein, 5 aa, Artificial Sequence
  Description of Artificial Sequence: Synthetic peptide
VPAAM

SEQ ID NO: 3835 - protein, 5 aa, Artificial Sequence
  Description of Artificial Sequence: Synthetic peptide
PAAMP

SEQ ID NO: 3836 - protein, 4 aa, Artificial Sequence
  Description of Artificial Sequence: Synthetic peptide
VVVP

SEQ ID NO: 3837 - protein, 4 aa, Artificial Sequence
  Description of Artificial Sequence: Synthetic peptide
VVPA

SEQ ID NO: 3838 - protein, 4 aa, Artificial Sequence
  Description of Artificial Sequence: Synthetic peptide
VPAA

SEQ ID NO: 3839 - protein, 4 aa, Artificial Sequence
  Description of Artificial Sequence: Synthetic peptide
PAAM

SEQ ID NO: 3840 - protein, 4 aa, Artificial Sequence
  Description of Artificial Sequence: Synthetic peptide
AAMP

SEQ ID NO: 3841 - protein, 5 aa, Artificial Sequence
  Description of Artificial Sequence: Synthetic peptide
YQLLY

SEQ ID NO: 3842 - protein, 4 aa, Artificial Sequence
  Description of Artificial Sequence: Synthetic peptide
QLLY

SEQ ID NO: 3843 - protein, 10 aa, Artificial Sequence
  Description of Artificial Sequence: Synthetic peptide
GYCSSTSCYT

SEQ ID NO: 3844 - protein, 9 aa, Artificial Sequence
  Description of Artificial Sequence: Synthetic peptide
YCSSTSCYT

SEQ ID NO: 3845 - protein, 8 aa, Artificial Sequence
  Description of Artificial Sequence: Synthetic peptide
CSSTSCYT

SEQ ID NO: 3846 - protein, 10 aa, Artificial Sequence
  Description of Artificial Sequence: Synthetic peptide
DIVVVPAAIP

SEQ ID NO: 3847 - protein, 9 aa, Artificial Sequence
  Description of Artificial Sequence: Synthetic peptide
DIVVVPAAI

SEQ ID NO: 3848 - protein, 9 aa, Artificial Sequence
  Description of Artificial Sequence: Synthetic peptide
IVVVPAAIP

SEQ ID NO: 3849 - protein, 8 aa, Artificial Sequence
  Description of Artificial Sequence: Synthetic peptide
IVVVPAAI

SEQ ID NO: 3850 - protein, 8 aa, Artificial Sequence
  Description of Artificial Sequence: Synthetic peptide
VVVPAAIP

SEQ ID NO: 3851 - protein, 7 aa, Artificial Sequence
  Description of Artificial Sequence: Synthetic peptide
VVVPAAI

SEQ ID NO: 3852 - protein, 7 aa, Artificial Sequence
  Description of Artificial Sequence: Synthetic peptide
VVPAAIP

SEQ ID NO: 3853 - protein, 6 aa, Artificial Sequence
  Description of Artificial Sequence: Synthetic peptide
VVPAAI

SEQ ID NO: 3854 - protein, 6 aa, Artificial Sequence
  Description of Artificial Sequence: Synthetic peptide
VPAAIP

SEQ ID NO: 3855 - protein, 5 aa, Artificial Sequence
  Description of Artificial Sequence: Synthetic peptide
VPAAI

SEQ ID NO: 3856 - protein, 5 aa, Artificial Sequence
  Description of Artificial Sequence: Synthetic peptide
PAAIP

SEQ ID NO: 3857 - protein, 4 aa, Artificial Sequence
  Description of Artificial Sequence: Synthetic peptide
PAAI

SEQ ID NO: 3858 - protein, 4 aa, Artificial Sequence
  Description of Artificial Sequence: Synthetic peptide
AAIP

SEQ ID NO: 3859 - protein, 5 aa, Artificial Sequence
  Description of Artificial Sequence: Synthetic peptide
SILWW

SEQ ID NO: 3860 - protein, 4 aa, Artificial Sequence
  Description of Artificial Sequence: Synthetic peptide
SILW

SEQ ID NO: 3861 - protein, 4 aa, Artificial Sequence
  Description of Artificial Sequence: Synthetic peptide
ILWW

SEQ ID NO: 3862 - protein, 9 aa, Artificial Sequence
  Description of Artificial Sequence: Synthetic peptide
AYCGGDCYS

SEQ ID NO: 3863 - protein, 8 aa, Artificial Sequence
  Description of Artificial Sequence: Synthetic peptide
AYCGGDCY

SEQ ID NO: 3864 - protein, 8 aa, Artificial Sequence
  Description of Artificial Sequence: Synthetic peptide
YCGGDCYS

SEQ ID NO: 3865 - protein, 7 aa, Artificial Sequence
  Description of Artificial Sequence: Synthetic peptide
AYCGGDC

SEQ ID NO: 3866 - protein, 7 aa, Artificial Sequence
  Description of Artificial Sequence: Synthetic peptide
YCGGDCY

SEQ ID NO: 3867 - protein, 7 aa, Artificial Sequence
  Description of Artificial Sequence: Synthetic peptide
CGGDCYS

SEQ ID NO: 3868 - protein, 6 aa, Artificial Sequence
  Description of Artificial Sequence: Synthetic peptide
YCGGDC

SEQ ID NO: 3869 - protein, 6 aa, Artificial Sequence
  Description of Artificial Sequence: Synthetic peptide
CGGDCY

SEQ ID NO: 3870 - protein, 5 aa, Artificial Sequence
  Description of Artificial Sequence: Synthetic peptide
CGGDC

SEQ ID NO: 3871 - protein, 9 aa, Artificial Sequence
  Description of Artificial Sequence: Synthetic peptide
HIVVVIAIP

SEQ ID NO: 3872 - protein, 8 aa, Artificial Sequence
  Description of Artificial Sequence: Synthetic peptide
HIVVVIAI

SEQ ID NO: 3873 - protein, 8 aa, Artificial Sequence
  Description of Artificial Sequence: Synthetic peptide
IVVVIAIP

SEQ ID NO: 3874 - protein, 7 aa, Artificial Sequence
  Description of Artificial Sequence: Synthetic peptide
HIVVVIA

SEQ ID NO: 3875 - protein, 7 aa, Artificial Sequence
  Description of Artificial Sequence: Synthetic peptide
IVVVIAI

SEQ ID NO: 3876 - protein, 7 aa, Artificial Sequence
  Description of Artificial Sequence: Synthetic peptide
VVVIAIP

SEQ ID NO: 3877 - protein, 6 aa, Artificial Sequence
  Description of Artificial Sequence: Synthetic peptide
HIVVVI

SEQ ID NO: 3878 - protein, 6 aa, Artificial Sequence
  Description of Artificial Sequence: Synthetic peptide
IVVVIA

SEQ ID NO: 3879 - protein, 6 aa, Artificial Sequence
  Description of Artificial Sequence: Synthetic peptide
VVVIAI

SEQ ID NO: 3880 - protein, 6 aa, Artificial Sequence
  Description of Artificial Sequence: Synthetic peptide
VVIAIP

SEQ ID NO: 3881 - protein, 5 aa, Artificial Sequence
  Description of Artificial Sequence: Synthetic peptide
HIVVV

SEQ ID NO: 3882 - protein, 5 aa, Artificial Sequence
  Description of Artificial Sequence: Synthetic peptide
IVVVI

SEQ ID NO: 3883 - protein, 5 aa, Artificial Sequence
  Description of Artificial Sequence: Synthetic peptide
VVVIA

SEQ ID NO: 3884 - protein, 5 aa, Artificial Sequence
  Description of Artificial Sequence: Synthetic peptide
VVIAI

SEQ ID NO: 3885 - protein, 5 aa, Artificial Sequence
  Description of Artificial Sequence: Synthetic peptide
VIAIP

SEQ ID NO: 3886 - protein, 4 aa, Artificial Sequence
  Description of Artificial Sequence: Synthetic peptide
HIVV

SEQ ID NO: 3887 - protein, 4 aa, Artificial Sequence
  Description of Artificial Sequence: Synthetic peptide
VVVI

SEQ ID NO: 3888 - protein, 4 aa, Artificial Sequence
  Description of Artificial Sequence: Synthetic peptide
VVIA

SEQ ID NO: 3889 - protein, 4 aa, Artificial Sequence
  Description of Artificial Sequence: Synthetic peptide
VIAI

SEQ ID NO: 3890 - protein, 4 aa, Artificial Sequence
  Description of Artificial Sequence: Synthetic peptide
IAIP

SEQ ID NO: 3891 - protein, 9 aa, Artificial Sequence
  Description of Artificial Sequence: Synthetic peptide
HIVVVTAIP

SEQ ID NO: 3892 - protein, 8 aa, Artificial Sequence
  Description of Artificial Sequence: Synthetic peptide
HIVVVTAI

SEQ ID NO: 3893 - protein, 8 aa, Artificial Sequence
  Description of Artificial Sequence: Synthetic peptide
IVVVTAIP

SEQ ID NO: 3894 - protein, 7 aa, Artificial Sequence
  Description of Artificial Sequence: Synthetic peptide
HIVVVTA

SEQ ID NO: 3895 - protein, 7 aa, Artificial Sequence
  Description of Artificial Sequence: Synthetic peptide
IVVVTAI

SEQ ID NO: 3896 - protein, 7 aa, Artificial Sequence
  Description of Artificial Sequence: Synthetic peptide
VVVTAIP

SEQ ID NO: 3897 - protein, 6 aa, Artificial Sequence
  Description of Artificial Sequence: Synthetic peptide
HIVVVT

SEQ ID NO: 3898 - protein, 6 aa, Artificial Sequence
  Description of Artificial Sequence: Synthetic peptide
IVVVTA

SEQ ID NO: 3899 - protein, 6 aa, Artificial Sequence
  Description of Artificial Sequence: Synthetic peptide
VVVTAI

SEQ ID NO: 3900 - protein, 6 aa, Artificial Sequence
  Description of Artificial Sequence: Synthetic peptide
VVTAIP

SEQ ID NO: 3901 - protein, 5 aa, Artificial Sequence
  Description of Artificial Sequence: Synthetic peptide
IVVVT

SEQ ID NO: 3902 - protein, 5 aa, Artificial Sequence
  Description of Artificial Sequence: Synthetic peptide
VVVTA

SEQ ID NO: 3903 - protein, 5 aa, Artificial Sequence
  Description of Artificial Sequence: Synthetic peptide
VVTAI

SEQ ID NO: 3904 - protein, 5 aa, Artificial Sequence
  Description of Artificial Sequence: Synthetic peptide
VTAIP

SEQ ID NO: 3905 - protein, 4 aa, Artificial Sequence
  Description of Artificial Sequence: Synthetic peptide
VVVT

SEQ ID NO: 3906 - protein, 4 aa, Artificial Sequence
  Description of Artificial Sequence: Synthetic peptide
VVTA

SEQ ID NO: 3907 - protein, 4 aa, Artificial Sequence
  Description of Artificial Sequence: Synthetic peptide
VTAI

SEQ ID NO: 3908 - protein, 4 aa, Artificial Sequence
  Description of Artificial Sequence: Synthetic peptide
TAIP

SEQ ID NO: 3909 - protein, 4 aa, Artificial Sequence
  Description of Artificial Sequence: Synthetic peptide
RILY

SEQ ID NO: 3910 - protein, 10 aa, Artificial Sequence
  Description of Artificial Sequence: Synthetic peptide
GYCTNGVCYT

SEQ ID NO: 3911 - protein, 9 aa, Artificial Sequence
  Description of Artificial Sequence: Synthetic peptide
GYCTNGVCY

SEQ ID NO: 3912 - protein, 9 aa, Artificial Sequence
  Description of Artificial Sequence: Synthetic peptide
YCTNGVCYT

SEQ ID NO: 3913 - protein, 8 aa, Artificial Sequence
  Description of Artificial Sequence: Synthetic peptide
GYCTNGVC

SEQ ID NO: 3914 - protein, 8 aa, Artificial Sequence
  Description of Artificial Sequence: Synthetic peptide
YCTNGVCY

SEQ ID NO: 3915 - protein, 8 aa, Artificial Sequence
  Description of Artificial Sequence: Synthetic peptide
CTNGVCYT

SEQ ID NO: 3916 - protein, 7 aa, Artificial Sequence
  Description of Artificial Sequence: Synthetic peptide
YCTNGVC

SEQ ID NO: 3917 - protein, 7 aa, Artificial Sequence
  Description of Artificial Sequence: Synthetic peptide
CTNGVCY

SEQ ID NO: 3918 - protein, 6 aa, Artificial Sequence
  Description of Artificial Sequence: Synthetic peptide
CTNGVC

SEQ ID NO: 3919 - protein, 4 aa, Artificial Sequence
  Description of Artificial Sequence: Synthetic peptide
TNGV

SEQ ID NO: 3920 - protein, 10 aa, Artificial Sequence
  Description of Artificial Sequence: Synthetic peptide
DIVLMVYAIP

SEQ ID NO: 3921 - protein, 9 aa, Artificial Sequence
  Description of Artificial Sequence: Synthetic peptide
DIVLMVYAI

SEQ ID NO: 3922 - protein, 9 aa, Artificial Sequence
  Description of Artificial Sequence: Synthetic peptide
IVLMVYAIP

SEQ ID NO: 3923 - protein, 8 aa, Artificial Sequence
  Description of Artificial Sequence: Synthetic peptide
DIVLMVYA

SEQ ID NO: 3924 - protein, 8 aa, Artificial Sequence
  Description of Artificial Sequence: Synthetic peptide
IVLMVYAI

SEQ ID NO: 3925 - protein, 8 aa, Artificial Sequence
  Description of Artificial Sequence: Synthetic peptide
VLMVYAIP

SEQ ID NO: 3926 - protein, 7 aa, Artificial Sequence
  Description of Artificial Sequence: Synthetic peptide
DIVLMVY

SEQ ID NO: 3927 - protein, 7 aa, Artificial Sequence
  Description of Artificial Sequence: Synthetic peptide
IVLMVYA

SEQ ID NO: 3928 - protein, 7 aa, Artificial Sequence
  Description of Artificial Sequence: Synthetic peptide
VLMVYAI

SEQ ID NO: 3929 - protein, 7 aa, Artificial Sequence
  Description of Artificial Sequence: Synthetic peptide
LMVYAIP

SEQ ID NO: 3930 - protein, 6 aa, Artificial Sequence
  Description of Artificial Sequence: Synthetic peptide
DIVLMV

SEQ ID NO: 3931 - protein, 6 aa, Artificial Sequence
  Description of Artificial Sequence: Synthetic peptide
IVLMVY

SEQ ID NO: 3932 - protein, 6 aa, Artificial Sequence
  Description of Artificial Sequence: Synthetic peptide
VLMVYA

SEQ ID NO: 3933 - protein, 6 aa, Artificial Sequence
  Description of Artificial Sequence: Synthetic peptide
LMVYAI

SEQ ID NO: 3934 - protein, 6 aa, Artificial Sequence
  Description of Artificial Sequence: Synthetic peptide
MVYAIP

SEQ ID NO: 3935 - protein, 5 aa, Artificial Sequence
  Description of Artificial Sequence: Synthetic peptide
DIVLM

SEQ ID NO: 3936 - protein, 5 aa, Artificial Sequence
  Description of Artificial Sequence: Synthetic peptide
IVLMV

SEQ ID NO: 3937 - protein, 5 aa, Artificial Sequence
  Description of Artificial Sequence: Synthetic peptide
VLMVY

SEQ ID NO: 3938 - protein, 5 aa, Artificial Sequence
  Description of Artificial Sequence: Synthetic peptide
LMVYA

SEQ ID NO: 3939 - protein, 5 aa, Artificial Sequence
  Description of Artificial Sequence: Synthetic peptide
MVYAI

SEQ ID NO: 3940 - protein, 5 aa, Artificial Sequence
  Description of Artificial Sequence: Synthetic peptide
VYAIP

SEQ ID NO: 3941 - protein, 4 aa, Artificial Sequence
  Description of Artificial Sequence: Synthetic peptide
DIVL

SEQ ID NO: 3942 - protein, 4 aa, Artificial Sequence
  Description of Artificial Sequence: Synthetic peptide
IVLM

SEQ ID NO: 3943 - protein, 4 aa, Artificial Sequence
  Description of Artificial Sequence: Synthetic peptide
VLMV

SEQ ID NO: 3944 - protein, 4 aa, Artificial Sequence
  Description of Artificial Sequence: Synthetic peptide
LMVY

SEQ ID NO: 3945 - protein, 4 aa, Artificial Sequence
  Description of Artificial Sequence: Synthetic peptide
MVYA

SEQ ID NO: 3946 - protein, 4 aa, Artificial Sequence
  Description of Artificial Sequence: Synthetic peptide
VYAI

SEQ ID NO: 3947 - protein, 4 aa, Artificial Sequence
  Description of Artificial Sequence: Synthetic peptide
YAIP

SEQ ID NO: 3948 - protein, 9 aa, Artificial Sequence
  Description of Artificial Sequence: Synthetic peptide
VLLWFGELL

SEQ ID NO: 3949 - protein, 8 aa, Artificial Sequence
  Description of Artificial Sequence: Synthetic peptide
VLLWFGEL

SEQ ID NO: 3950 - protein, 8 aa, Artificial Sequence
  Description of Artificial Sequence: Synthetic peptide
LLWFGELL

SEQ ID NO: 3951 - protein, 7 aa, Artificial Sequence
  Description of Artificial Sequence: Synthetic peptide
VLLWFGE

SEQ ID NO: 3952 - protein, 7 aa, Artificial Sequence
  Description of Artificial Sequence: Synthetic peptide
LLWFGEL

SEQ ID NO: 3953 - protein, 7 aa, Artificial Sequence
  Description of Artificial Sequence: Synthetic peptide
LWFGELL

SEQ ID NO: 3954 - protein, 6 aa, Artificial Sequence
  Description of Artificial Sequence: Synthetic peptide
VLLWFG

SEQ ID NO: 3955 - protein, 6 aa, Artificial Sequence
  Description of Artificial Sequence: Synthetic peptide
LLWFGE

SEQ ID NO: 3956 - protein, 6 aa, Artificial Sequence
  Description of Artificial Sequence: Synthetic peptide
LWFGEL

SEQ ID NO: 3957 - protein, 6 aa, Artificial Sequence
  Description of Artificial Sequence: Synthetic peptide
WFGELL

SEQ ID NO: 3958 - protein, 5 aa, Artificial Sequence
  Description of Artificial Sequence: Synthetic peptide
VLLWF

SEQ ID NO: 3959 - protein, 5 aa, Artificial Sequence
  Description of Artificial Sequence: Synthetic peptide
LLWFG

SEQ ID NO: 3960 - protein, 5 aa, Artificial Sequence
  Description of Artificial Sequence: Synthetic peptide
LWFGE

SEQ ID NO: 3961 - protein, 5 aa, Artificial Sequence
  Description of Artificial Sequence: Synthetic peptide
WFGEL

SEQ ID NO: 3962 - protein, 5 aa, Artificial Sequence
  Description of Artificial Sequence: Synthetic peptide
FGELL

SEQ ID NO: 3963 - protein, 4 aa, Artificial Sequence
  Description of Artificial Sequence: Synthetic peptide
VLLW

SEQ ID NO: 3964 - protein, 4 aa, Artificial Sequence
  Description of Artificial Sequence: Synthetic peptide
LLWF

SEQ ID NO: 3965 - protein, 4 aa, Artificial Sequence
  Description of Artificial Sequence: Synthetic peptide
LWFG

SEQ ID NO: 3966 - protein, 4 aa, Artificial Sequence
  Description of Artificial Sequence: Synthetic peptide
WFGE

SEQ ID NO: 3967 - protein, 4 aa, Artificial Sequence
  Description of Artificial Sequence: Synthetic peptide
FGEL

SEQ ID NO: 3968 - protein, 4 aa, Artificial Sequence
  Description of Artificial Sequence: Synthetic peptide
GELL

SEQ ID NO: 3969 - protein, 10 aa, Artificial Sequence
  Description of Artificial Sequence: Synthetic peptide
YYYGSGSYYN

SEQ ID NO: 3970 - protein, 9 aa, Artificial Sequence
  Description of Artificial Sequence: Synthetic peptide
YYYGSGSYY

SEQ ID NO: 3971 - protein, 9 aa, Artificial Sequence
  Description of Artificial Sequence: Synthetic peptide
YYGSGSYYN

SEQ ID NO: 3972 - protein, 8 aa, Artificial Sequence
  Description of Artificial Sequence: Synthetic peptide
YYYGSGSY

SEQ ID NO: 3973 - protein, 8 aa, Artificial Sequence
  Description of Artificial Sequence: Synthetic peptide
YYGSGSYY

SEQ ID NO: 3974 - protein, 8 aa, Artificial Sequence
  Description of Artificial Sequence: Synthetic peptide
YGSGSYYN

SEQ ID NO: 3975 - protein, 7 aa, Artificial Sequence
  Description of Artificial Sequence: Synthetic peptide
YYYGSGS

SEQ ID NO: 3976 - protein, 7 aa, Artificial Sequence
  Description of Artificial Sequence: Synthetic peptide
YYGSGSY

SEQ ID NO: 3977 - protein, 7 aa, Artificial Sequence
  Description of Artificial Sequence: Synthetic peptide
YGSGSYY

SEQ ID NO: 3978 - protein, 7 aa, Artificial Sequence
  Description of Artificial Sequence: Synthetic peptide
GSGSYYN

SEQ ID NO: 3979 - protein, 6 aa, Artificial Sequence
  Description of Artificial Sequence: Synthetic peptide
YYYGSG

SEQ ID NO: 3980 - protein, 6 aa, Artificial Sequence
  Description of Artificial Sequence: Synthetic peptide
YYGSGS

SEQ ID NO: 3981 - protein, 6 aa, Artificial Sequence
  Description of Artificial Sequence: Synthetic peptide
YGSGSY

SEQ ID NO: 3982 - protein, 6 aa, Artificial Sequence
  Description of Artificial Sequence: Synthetic peptide
GSGSYY

SEQ ID NO: 3983 - protein, 6 aa, Artificial Sequence
  Description of Artificial Sequence: Synthetic peptide
SGSYYN

SEQ ID NO: 3984 - protein, 5 aa, Artificial Sequence
  Description of Artificial Sequence: Synthetic peptide
YYYGS

SEQ ID NO: 3985 - protein, 5 aa, Artificial Sequence
  Description of Artificial Sequence: Synthetic peptide
YYGSG

SEQ ID NO: 3986 - protein, 5 aa, Artificial Sequence
  Description of Artificial Sequence: Synthetic peptide
YGSGS

SEQ ID NO: 3987 - protein, 5 aa, Artificial Sequence
  Description of Artificial Sequence: Synthetic peptide
GSGSY

SEQ ID NO: 3988 - protein, 5 aa, Artificial Sequence
  Description of Artificial Sequence: Synthetic peptide
GSYYN

SEQ ID NO: 3989 - protein, 4 aa, Artificial Sequence
  Description of Artificial Sequence: Synthetic peptide
YYYG

SEQ ID NO: 3990 - protein, 4 aa, Artificial Sequence
  Description of Artificial Sequence: Synthetic peptide
YYGS

SEQ ID NO: 3991 - protein, 4 aa, Artificial Sequence
  Description of Artificial Sequence: Synthetic peptide
YGSG

SEQ ID NO: 3992 - protein, 4 aa, Artificial Sequence
  Description of Artificial Sequence: Synthetic peptide
GSGS

SEQ ID NO: 3993 - protein, 4 aa, Artificial Sequence
  Description of Artificial Sequence: Synthetic peptide
SYYN

SEQ ID NO: 3994 - protein, 10 aa, Artificial Sequence
  Description of Artificial Sequence: Synthetic peptide
ITMVRGVIIT

SEQ ID NO: 3995 - protein, 9 aa, Artificial Sequence
  Description of Artificial Sequence: Synthetic peptide
ITMVRGVII

SEQ ID NO: 3996 - protein, 9 aa, Artificial Sequence
  Description of Artificial Sequence: Synthetic peptide
TMVRGVIIT

SEQ ID NO: 3997 - protein, 8 aa, Artificial Sequence
  Description of Artificial Sequence: Synthetic peptide
ITMVRGVI

SEQ ID NO: 3998 - protein, 8 aa, Artificial Sequence
  Description of Artificial Sequence: Synthetic peptide
TMVRGVII

SEQ ID NO: 3999 - protein, 8 aa, Artificial Sequence
  Description of Artificial Sequence: Synthetic peptide
MVRGVIIT

SEQ ID NO: 4000 - protein, 7 aa, Artificial Sequence
  Description of Artificial Sequence: Synthetic peptide
ITMVRGV

SEQ ID NO: 4001 - protein, 7 aa, Artificial Sequence
  Description of Artificial Sequence: Synthetic peptide
TMVRGVI

SEQ ID NO: 4002 - protein, 7 aa, Artificial Sequence
  Description of Artificial Sequence: Synthetic peptide
MVRGVII

SEQ ID NO: 4003 - protein, 7 aa, Artificial Sequence
  Description of Artificial Sequence: Synthetic peptide
VRGVIIT

SEQ ID NO: 4004 - protein, 6 aa, Artificial Sequence
  Description of Artificial Sequence: Synthetic peptide
ITMVRG

SEQ ID NO: 4005 - protein, 6 aa, Artificial Sequence
  Description of Artificial Sequence: Synthetic peptide
TMVRGV

SEQ ID NO: 4006 - protein, 6 aa, Artificial Sequence
  Description of Artificial Sequence: Synthetic peptide
MVRGVI

SEQ ID NO: 4007 - protein, 6 aa, Artificial Sequence
  Description of Artificial Sequence: Synthetic peptide
VRGVII

SEQ ID NO: 4008 - protein, 6 aa, Artificial Sequence
  Description of Artificial Sequence: Synthetic peptide
RGVIIT

SEQ ID NO: 4009 - protein, 5 aa, Artificial Sequence
  Description of Artificial Sequence: Synthetic peptide
ITMVR

SEQ ID NO: 4010 - protein, 5 aa, Artificial Sequence
  Description of Artificial Sequence: Synthetic peptide
TMVRG

SEQ ID NO: 4011 - protein, 5 aa, Artificial Sequence
  Description of Artificial Sequence: Synthetic peptide
MVRGV

SEQ ID NO: 4012 - protein, 5 aa, Artificial Sequence
  Description of Artificial Sequence: Synthetic peptide
VRGVI

SEQ ID NO: 4013 - protein, 5 aa, Artificial Sequence
  Description of Artificial Sequence: Synthetic peptide
RGVII

SEQ ID NO: 4014 - protein, 5 aa, Artificial Sequence
  Description of Artificial Sequence: Synthetic peptide
GVIIT

SEQ ID NO: 4015 - protein, 4 aa, Artificial Sequence
  Description of Artificial Sequence: Synthetic peptide
ITMV

SEQ ID NO: 4016 - protein, 4 aa, Artificial Sequence
  Description of Artificial Sequence: Synthetic peptide
TMVR

SEQ ID NO: 4017 - protein, 4 aa, Artificial Sequence
  Description of Artificial Sequence: Synthetic peptide
MVRG

SEQ ID NO: 4018 - protein, 4 aa, Artificial Sequence
  Description of Artificial Sequence: Synthetic peptide
VRGV

SEQ ID NO: 4019 - protein, 4 aa, Artificial Sequence
  Description of Artificial Sequence: Synthetic peptide
RGVI

SEQ ID NO: 4020 - protein, 4 aa, Artificial Sequence
  Description of Artificial Sequence: Synthetic peptide
GVII

SEQ ID NO: 4021 - protein, 4 aa, Artificial Sequence
  Description of Artificial Sequence: Synthetic peptide
VIIT

SEQ ID NO: 4022 - protein, 9 aa, Artificial Sequence
  Description of Artificial Sequence: Synthetic peptide
VLLWFRELL

SEQ ID NO: 4023 - protein, 8 aa, Artificial Sequence
  Description of Artificial Sequence: Synthetic peptide
VLLWFREL

SEQ ID NO: 4024 - protein, 8 aa, Artificial Sequence
  Description of Artificial Sequence: Synthetic peptide
LLWFRELL

SEQ ID NO: 4025 - protein, 7 aa, Artificial Sequence
  Description of Artificial Sequence: Synthetic peptide
VLLWFRE

SEQ ID NO: 4026 - protein, 7 aa, Artificial Sequence
  Description of Artificial Sequence: Synthetic peptide
LLWFREL

SEQ ID NO: 4027 - protein, 7 aa, Artificial Sequence
  Description of Artificial Sequence: Synthetic peptide
LWFRELL

SEQ ID NO: 4028 - protein, 6 aa, Artificial Sequence
  Description of Artificial Sequence: Synthetic peptide
VLLWFR

SEQ ID NO: 4029 - protein, 6 aa, Artificial Sequence
  Description of Artificial Sequence: Synthetic peptide
LLWFRE

SEQ ID NO: 4030 - protein, 6 aa, Artificial Sequence
  Description of Artificial Sequence: Synthetic peptide
LWFREL

SEQ ID NO: 4031 - protein, 6 aa, Artificial Sequence
  Description of Artificial Sequence: Synthetic peptide
WFRELL

SEQ ID NO: 4032 - protein, 5 aa, Artificial Sequence
  Description of Artificial Sequence: Synthetic peptide
LLWFR

SEQ ID NO: 4033 - protein, 5 aa, Artificial Sequence
  Description of Artificial Sequence: Synthetic peptide
LWFRE

SEQ ID NO: 4034 - protein, 5 aa, Artificial Sequence
  Description of Artificial Sequence: Synthetic peptide
WFREL

SEQ ID NO: 4035 - protein, 5 aa, Artificial Sequence
  Description of Artificial Sequence: Synthetic peptide
FRELL

SEQ ID NO: 4036 - protein, 4 aa, Artificial Sequence
  Description of Artificial Sequence: Synthetic peptide
LWFR

SEQ ID NO: 4037 - protein, 4 aa, Artificial Sequence
  Description of Artificial Sequence: Synthetic peptide
WFRE

SEQ ID NO: 4038 - protein, 4 aa, Artificial Sequence
  Description of Artificial Sequence: Synthetic peptide
FREL

SEQ ID NO: 4039 - protein, 4 aa, Artificial Sequence
  Description of Artificial Sequence: Synthetic peptide
RELL

SEQ ID NO: 4040 - protein, 10 aa, Artificial Sequence
  Description of Artificial Sequence: Synthetic peptide
ITMVQGVIIT

SEQ ID NO: 4041 - protein, 9 aa, Artificial Sequence
  Description of Artificial Sequence: Synthetic peptide
ITMVQGVII

SEQ ID NO: 4042 - protein, 9 aa, Artificial Sequence
  Description of Artificial Sequence: Synthetic peptide
TMVQGVIIT

SEQ ID NO: 4043 - protein, 8 aa, Artificial Sequence
  Description of Artificial Sequence: Synthetic peptide
ITMVQGVI

SEQ ID NO: 4044 - protein, 8 aa, Artificial Sequence
  Description of Artificial Sequence: Synthetic peptide
TMVQGVII

SEQ ID NO: 4045 - protein, 8 aa, Artificial Sequence
  Description of Artificial Sequence: Synthetic peptide
MVQGVIIT

SEQ ID NO: 4046 - protein, 7 aa, Artificial Sequence
  Description of Artificial Sequence: Synthetic peptide
ITMVQGV

SEQ ID NO: 4047 - protein, 7 aa, Artificial Sequence
  Description of Artificial Sequence: Synthetic peptide
TMVQGVI

SEQ ID NO: 4048 - protein, 7 aa, Artificial Sequence
  Description of Artificial Sequence: Synthetic peptide
MVQGVII

SEQ ID NO: 4049 - protein, 7 aa, Artificial Sequence
  Description of Artificial Sequence: Synthetic peptide
VQGVIIT

SEQ ID NO: 4050 - protein, 6 aa, Artificial Sequence
  Description of Artificial Sequence: Synthetic peptide
ITMVQG

SEQ ID NO: 4051 - protein, 6 aa, Artificial Sequence
  Description of Artificial Sequence: Synthetic peptide
TMVQGV

SEQ ID NO: 4052 - protein, 6 aa, Artificial Sequence
  Description of Artificial Sequence: Synthetic peptide
MVQGVI

SEQ ID NO: 4053 - protein, 6 aa, Artificial Sequence
  Description of Artificial Sequence: Synthetic peptide
VQGVII

SEQ ID NO: 4054 - protein, 6 aa, Artificial Sequence
  Description of Artificial Sequence: Synthetic peptide
QGVIIT

SEQ ID NO: 4055 - protein, 5 aa, Artificial Sequence
  Description of Artificial Sequence: Synthetic peptide
ITMVQ

SEQ ID NO: 4056 - protein, 5 aa, Artificial Sequence
  Description of Artificial Sequence: Synthetic peptide
TMVQG

SEQ ID NO: 4057 - protein, 5 aa, Artificial Sequence
  Description of Artificial Sequence: Synthetic peptide
MVQGV

SEQ ID NO: 4058 - protein, 5 aa, Artificial Sequence
  Description of Artificial Sequence: Synthetic peptide
VQGVI

SEQ ID NO: 4059 - protein, 5 aa, Artificial Sequence
  Description of Artificial Sequence: Synthetic peptide
QGVII

SEQ ID NO: 4060 - protein, 4 aa, Artificial Sequence
  Description of Artificial Sequence: Synthetic peptide
TMVQ

SEQ ID NO: 4061 - protein, 4 aa, Artificial Sequence
  Description of Artificial Sequence: Synthetic peptide
MVQG

SEQ ID NO: 4062 - protein, 4 aa, Artificial Sequence
  Description of Artificial Sequence: Synthetic peptide
VQGV

SEQ ID NO: 4063 - protein, 4 aa, Artificial Sequence
  Description of Artificial Sequence: Synthetic peptide
QGVI

SEQ ID NO: 4064 - protein, 6 aa, Artificial Sequence
  Description of Artificial Sequence: Synthetic peptide
LRLGEL

SEQ ID NO: 4065 - protein, 5 aa, Artificial Sequence
  Description of Artificial Sequence: Synthetic peptide
LRLGE

SEQ ID NO: 4066 - protein, 5 aa, Artificial Sequence
  Description of Artificial Sequence: Synthetic peptide
RLGEL

SEQ ID NO: 4067 - protein, 4 aa, Artificial Sequence
  Description of Artificial Sequence: Synthetic peptide
LRLG

SEQ ID NO: 4068 - protein, 4 aa, Artificial Sequence
  Description of Artificial Sequence: Synthetic peptide
RLGE

SEQ ID NO: 4069 - protein, 4 aa, Artificial Sequence
  Description of Artificial Sequence: Synthetic peptide
LGEL

SEQ ID NO: 4070 - protein, 12 aa, Artificial Sequence
  Description of Artificial Sequence: Synthetic peptide
YYDYVWGSYAYT

SEQ ID NO: 4071 - protein, 11 aa, Artificial Sequence
  Description of Artificial Sequence: Synthetic peptide
YYDYVWGSYAY

SEQ ID NO: 4072 - protein, 11 aa, Artificial Sequence
  Description of Artificial Sequence: Synthetic peptide
YDYVWGSYAYT

SEQ ID NO: 4073 - protein, 10 aa, Artificial Sequence
  Description of Artificial Sequence: Synthetic peptide
YYDYVWGSYA

SEQ ID NO: 4074 - protein, 10 aa, Artificial Sequence
  Description of Artificial Sequence: Synthetic peptide
YDYVWGSYAY

SEQ ID NO: 4075 - protein, 10 aa, Artificial Sequence
  Description of Artificial Sequence: Synthetic peptide
DYVWGSYAYT

SEQ ID NO: 4076 - protein, 9 aa, Artificial Sequence
  Description of Artificial Sequence: Synthetic peptide
YYDYVWGSY

SEQ ID NO: 4077 - protein, 9 aa, Artificial Sequence
  Description of Artificial Sequence: Synthetic peptide
YDYVWGSYA

SEQ ID NO: 4078 - protein, 9 aa, Artificial Sequence
  Description of Artificial Sequence: Synthetic peptide
DYVWGSYAY

SEQ ID NO: 4079 - protein, 9 aa, Artificial Sequence
  Description of Artificial Sequence: Synthetic peptide
YVWGSYAYT

SEQ ID NO: 4080 - protein, 8 aa, Artificial Sequence
  Description of Artificial Sequence: Synthetic peptide
YYDYVWGS

SEQ ID NO: 4081 - protein, 8 aa, Artificial Sequence
  Description of Artificial Sequence: Synthetic peptide
YDYVWGSY

SEQ ID NO: 4082 - protein, 8 aa, Artificial Sequence
  Description of Artificial Sequence: Synthetic peptide
DYVWGSYA

SEQ ID NO: 4083 - protein, 8 aa, Artificial Sequence
  Description of Artificial Sequence: Synthetic peptide
YVWGSYAY

SEQ ID NO: 4084 - protein, 8 aa, Artificial Sequence
  Description of Artificial Sequence: Synthetic peptide
VWGSYAYT

SEQ ID NO: 4085 - protein, 7 aa, Artificial Sequence
  Description of Artificial Sequence: Synthetic peptide
YYDYVWG

SEQ ID NO: 4086 - protein, 7 aa, Artificial Sequence
  Description of Artificial Sequence: Synthetic peptide
YDYVWGS

SEQ ID NO: 4087 - protein, 7 aa, Artificial Sequence
  Description of Artificial Sequence: Synthetic peptide
DYVWGSY

SEQ ID NO: 4088 - protein, 7 aa, Artificial Sequence
  Description of Artificial Sequence: Synthetic peptide
YVWGSYA

SEQ ID NO: 4089 - protein, 7 aa, Artificial Sequence
  Description of Artificial Sequence: Synthetic peptide
VWGSYAY

SEQ ID NO: 4090 - protein, 7 aa, Artificial Sequence
  Description of Artificial Sequence: Synthetic peptide
WGSYAYT

SEQ ID NO: 4091 - protein, 6 aa, Artificial Sequence
  Description of Artificial Sequence: Synthetic peptide
YYDYVW

SEQ ID NO: 4092 - protein, 6 aa, Artificial Sequence
  Description of Artificial Sequence: Synthetic peptide
YDYVWG

SEQ ID NO: 4093 - protein, 6 aa, Artificial Sequence
  Description of Artificial Sequence: Synthetic peptide
DYVWGS

SEQ ID NO: 4094 - protein, 6 aa, Artificial Sequence
  Description of Artificial Sequence: Synthetic peptide
YVWGSY

SEQ ID NO: 4095 - protein, 6 aa, Artificial Sequence
  Description of Artificial Sequence: Synthetic peptide
VWGSYA

SEQ ID NO: 4096 - protein, 6 aa, Artificial Sequence
  Description of Artificial Sequence: Synthetic peptide
WGSYAY

SEQ ID NO: 4097 - protein, 6 aa, Artificial Sequence
  Description of Artificial Sequence: Synthetic peptide
GSYAYT

SEQ ID NO: 4098 - protein, 5 aa, Artificial Sequence
  Description of Artificial Sequence: Synthetic peptide
YYDYV

SEQ ID NO: 4099 - protein, 5 aa, Artificial Sequence
  Description of Artificial Sequence: Synthetic peptide
YDYVW

SEQ ID NO: 4100 - protein, 5 aa, Artificial Sequence
  Description of Artificial Sequence: Synthetic peptide
DYVWG

SEQ ID NO: 4101 - protein, 5 aa, Artificial Sequence
  Description of Artificial Sequence: Synthetic peptide
YVWGS

SEQ ID NO: 4102 - protein, 5 aa, Artificial Sequence
  Description of Artificial Sequence: Synthetic peptide
VWGSY

SEQ ID NO: 4103 - protein, 5 aa, Artificial Sequence
  Description of Artificial Sequence: Synthetic peptide
WGSYA

SEQ ID NO: 4104 - protein, 5 aa, Artificial Sequence
  Description of Artificial Sequence: Synthetic peptide
GSYAY

SEQ ID NO: 4105 - protein, 5 aa, Artificial Sequence
  Description of Artificial Sequence: Synthetic peptide
SYAYT

SEQ ID NO: 4106 - protein, 4 aa, Artificial Sequence
  Description of Artificial Sequence: Synthetic peptide
YYDY

SEQ ID NO: 4107 - protein, 4 aa, Artificial Sequence
  Description of Artificial Sequence: Synthetic peptide
YDYV

SEQ ID NO: 4108 - protein, 4 aa, Artificial Sequence
  Description of Artificial Sequence: Synthetic peptide
DYVW

SEQ ID NO: 4109 - protein, 4 aa, Artificial Sequence
  Description of Artificial Sequence: Synthetic peptide
YVWG

SEQ ID NO: 4110 - protein, 4 aa, Artificial Sequence
  Description of Artificial Sequence: Synthetic peptide
VWGS

SEQ ID NO: 4111 - protein, 4 aa, Artificial Sequence
  Description of Artificial Sequence: Synthetic peptide
WGSY

SEQ ID NO: 4112 - protein, 4 aa, Artificial Sequence
  Description of Artificial Sequence: Synthetic peptide
GSYA

SEQ ID NO: 4113 - protein, 4 aa, Artificial Sequence
  Description of Artificial Sequence: Synthetic peptide
SYAY

SEQ ID NO: 4114 - protein, 4 aa, Artificial Sequence
  Description of Artificial Sequence: Synthetic peptide
YAYT

SEQ ID NO: 4115 - protein, 12 aa, Artificial Sequence
  Description of Artificial Sequence: Synthetic peptide
IMITFGGVMLIP

SEQ ID NO: 4116 - protein, 11 aa, Artificial Sequence
  Description of Artificial Sequence: Synthetic peptide
IMITFGGVMLI

SEQ ID NO: 4117 - protein, 11 aa, Artificial Sequence
  Description of Artificial Sequence: Synthetic peptide
MITFGGVMLIP

SEQ ID NO: 4118 - protein, 10 aa, Artificial Sequence
  Description of Artificial Sequence: Synthetic peptide
IMITFGGVML

SEQ ID NO: 4119 - protein, 10 aa, Artificial Sequence
  Description of Artificial Sequence: Synthetic peptide
MITFGGVMLI

SEQ ID NO: 4120 - protein, 10 aa, Artificial Sequence
  Description of Artificial Sequence: Synthetic peptide
ITFGGVMLIP

SEQ ID NO: 4121 - protein, 9 aa, Artificial Sequence
  Description of Artificial Sequence: Synthetic peptide
IMITFGGVM

SEQ ID NO: 4122 - protein, 9 aa, Artificial Sequence
  Description of Artificial Sequence: Synthetic peptide
MITFGGVML

SEQ ID NO: 4123 - protein, 9 aa, Artificial Sequence
  Description of Artificial Sequence: Synthetic peptide
ITFGGVMLI

SEQ ID NO: 4124 - protein, 9 aa, Artificial Sequence
  Description of Artificial Sequence: Synthetic peptide
TFGGVMLIP

SEQ ID NO: 4125 - protein, 8 aa, Artificial Sequence
  Description of Artificial Sequence: Synthetic peptide
IMITFGGV

SEQ ID NO: 4126 - protein, 8 aa, Artificial Sequence
  Description of Artificial Sequence: Synthetic peptide
MITFGGVM

SEQ ID NO: 4127 - protein, 8 aa, Artificial Sequence
  Description of Artificial Sequence: Synthetic peptide
ITFGGVML

SEQ ID NO: 4128 - protein, 8 aa, Artificial Sequence
  Description of Artificial Sequence: Synthetic peptide
TFGGVMLI

SEQ ID NO: 4129 - protein, 8 aa, Artificial Sequence
  Description of Artificial Sequence: Synthetic peptide
FGGVMLIP

SEQ ID NO: 4130 - protein, 7 aa, Artificial Sequence
  Description of Artificial Sequence: Synthetic peptide
IMITFGG

SEQ ID NO: 4131 - protein, 7 aa, Artificial Sequence
  Description of Artificial Sequence: Synthetic peptide
MITFGGV

SEQ ID NO: 4132 - protein, 7 aa, Artificial Sequence
  Description of Artificial Sequence: Synthetic peptide
ITFGGVM

SEQ ID NO: 4133 - protein, 7 aa, Artificial Sequence
  Description of Artificial Sequence: Synthetic peptide
TFGGVML

SEQ ID NO: 4134 - protein, 7 aa, Artificial Sequence
  Description of Artificial Sequence: Synthetic peptide
FGGVMLI

SEQ ID NO: 4135 - protein, 7 aa, Artificial Sequence
  Description of Artificial Sequence: Synthetic peptide
GGVMLIP

SEQ ID NO: 4136 - protein, 6 aa, Artificial Sequence
  Description of Artificial Sequence: Synthetic peptide
IMITFG

SEQ ID NO: 4137 - protein, 6 aa, Artificial Sequence
  Description of Artificial Sequence: Synthetic peptide
MITFGG

SEQ ID NO: 4138 - protein, 6 aa, Artificial Sequence
  Description of Artificial Sequence: Synthetic peptide
ITFGGV

SEQ ID NO: 4139 - protein, 6 aa, Artificial Sequence
  Description of Artificial Sequence: Synthetic peptide
TFGGVM

SEQ ID NO: 4140 - protein, 6 aa, Artificial Sequence
  Description of Artificial Sequence: Synthetic peptide
FGGVML

SEQ ID NO: 4141 - protein, 6 aa, Artificial Sequence
  Description of Artificial Sequence: Synthetic peptide
GGVMLI

SEQ ID NO: 4142 - protein, 6 aa, Artificial Sequence
  Description of Artificial Sequence: Synthetic peptide
GVMLIP

SEQ ID NO: 4143 - protein, 5 aa, Artificial Sequence
  Description of Artificial Sequence: Synthetic peptide
IMITF

SEQ ID NO: 4144 - protein, 5 aa, Artificial Sequence
  Description of Artificial Sequence: Synthetic peptide
MITFG

SEQ ID NO: 4145 - protein, 5 aa, Artificial Sequence
  Description of Artificial Sequence: Synthetic peptide
ITFGG

SEQ ID NO: 4146 - protein, 5 aa, Artificial Sequence
  Description of Artificial Sequence: Synthetic peptide
TFGGV

SEQ ID NO: 4147 - protein, 5 aa, Artificial Sequence
  Description of Artificial Sequence: Synthetic peptide
FGGVM

SEQ ID NO: 4148 - protein, 5 aa, Artificial Sequence
  Description of Artificial Sequence: Synthetic peptide
GGVML

SEQ ID NO: 4149 - protein, 5 aa, Artificial Sequence
  Description of Artificial Sequence: Synthetic peptide
GVMLI

SEQ ID NO: 4150 - protein, 5 aa, Artificial Sequence
  Description of Artificial Sequence: Synthetic peptide
VMLIP

SEQ ID NO: 4151 - protein, 4 aa, Artificial Sequence
  Description of Artificial Sequence: Synthetic peptide
IMIT

SEQ ID NO: 4152 - protein, 4 aa, Artificial Sequence
  Description of Artificial Sequence: Synthetic peptide
MITF

SEQ ID NO: 4153 - protein, 4 aa, Artificial Sequence
  Description of Artificial Sequence: Synthetic peptide
ITFG

SEQ ID NO: 4154 - protein, 4 aa, Artificial Sequence
  Description of Artificial Sequence: Synthetic peptide
TFGG

SEQ ID NO: 4155 - protein, 4 aa, Artificial Sequence
  Description of Artificial Sequence: Synthetic peptide
FGGV

SEQ ID NO: 4156 - protein, 4 aa, Artificial Sequence
  Description of Artificial Sequence: Synthetic peptide
GGVM

SEQ ID NO: 4157 - protein, 4 aa, Artificial Sequence
  Description of Artificial Sequence: Synthetic peptide
GVML

SEQ ID NO: 4158 - protein, 4 aa, Artificial Sequence
  Description of Artificial Sequence: Synthetic peptide
VMLI

SEQ ID NO: 4159 - protein, 4 aa, Artificial Sequence
  Description of Artificial Sequence: Synthetic peptide
MLIP

SEQ ID NO: 4160 - protein, 4 aa, Artificial Sequence
  Description of Artificial Sequence: Synthetic peptide
WLLL

SEQ ID NO: 4161 - protein, 10 aa, Artificial Sequence
  Description of Artificial Sequence: Synthetic peptide
YYYDSSGYYY

SEQ ID NO: 4162 - protein, 9 aa, Artificial Sequence
  Description of Artificial Sequence: Synthetic peptide
YYYDSSGYY

SEQ ID NO: 4163 - protein, 9 aa, Artificial Sequence
  Description of Artificial Sequence: Synthetic peptide
YYDSSGYYY

SEQ ID NO: 4164 - protein, 8 aa, Artificial Sequence
  Description of Artificial Sequence: Synthetic peptide
YYYDSSGY

SEQ ID NO: 4165 - protein, 8 aa, Artificial Sequence
  Description of Artificial Sequence: Synthetic peptide
YYDSSGYY

SEQ ID NO: 4166 - protein, 8 aa, Artificial Sequence
  Description of Artificial Sequence: Synthetic peptide
YDSSGYYY

SEQ ID NO: 4167 - protein, 7 aa, Artificial Sequence
  Description of Artificial Sequence: Synthetic peptide
YYYDSSG

SEQ ID NO: 4168 - protein, 7 aa, Artificial Sequence
  Description of Artificial Sequence: Synthetic peptide
YYDSSGY

SEQ ID NO: 4169 - protein, 7 aa, Artificial Sequence
  Description of Artificial Sequence: Synthetic peptide
YDSSGYY

SEQ ID NO: 4170 - protein, 7 aa, Artificial Sequence
  Description of Artificial Sequence: Synthetic peptide
DSSGYYY

SEQ ID NO: 4171 - protein, 6 aa, Artificial Sequence
  Description of Artificial Sequence: Synthetic peptide
YYYDSS

SEQ ID NO: 4172 - protein, 6 aa, Artificial Sequence
  Description of Artificial Sequence: Synthetic peptide
YYDSSG

SEQ ID NO: 4173 - protein, 6 aa, Artificial Sequence
  Description of Artificial Sequence: Synthetic peptide
YDSSGY

SEQ ID NO: 4174 - protein, 6 aa, Artificial Sequence
  Description of Artificial Sequence: Synthetic peptide
DSSGYY

SEQ ID NO: 4175 - protein, 6 aa, Artificial Sequence
  Description of Artificial Sequence: Synthetic peptide
SSGYYY

SEQ ID NO: 4176 - protein, 5 aa, Artificial Sequence
  Description of Artificial Sequence: Synthetic peptide
YYYDS

SEQ ID NO: 4177 - protein, 5 aa, Artificial Sequence
  Description of Artificial Sequence: Synthetic peptide
YYDSS

SEQ ID NO: 4178 - protein, 5 aa, Artificial Sequence
  Description of Artificial Sequence: Synthetic peptide
YDSSG

SEQ ID NO: 4179 - protein, 5 aa, Artificial Sequence
  Description of Artificial Sequence: Synthetic peptide
DSSGY

SEQ ID NO: 4180 - protein, 5 aa, Artificial Sequence
  Description of Artificial Sequence: Synthetic peptide
SSGYY

SEQ ID NO: 4181 - protein, 5 aa, Artificial Sequence
  Description of Artificial Sequence: Synthetic peptide
SGYYY

SEQ ID NO: 4182 - protein, 4 aa, Artificial Sequence
  Description of Artificial Sequence: Synthetic peptide
YYYD

SEQ ID NO: 4183 - protein, 4 aa, Artificial Sequence
  Description of Artificial Sequence: Synthetic peptide
YYDS

SEQ ID NO: 4184 - protein, 4 aa, Artificial Sequence
  Description of Artificial Sequence: Synthetic peptide
YDSS

SEQ ID NO: 4185 - protein, 4 aa, Artificial Sequence
  Description of Artificial Sequence: Synthetic peptide
DSSG

SEQ ID NO: 4186 - protein, 4 aa, Artificial Sequence
  Description of Artificial Sequence: Synthetic peptide
SSGY

SEQ ID NO: 4187 - protein, 4 aa, Artificial Sequence
  Description of Artificial Sequence: Synthetic peptide
SGYY

SEQ ID NO: 4188 - protein, 4 aa, Artificial Sequence
  Description of Artificial Sequence: Synthetic peptide
GYYY

SEQ ID NO: 4189 - protein, 10 aa, Artificial Sequence
  Description of Artificial Sequence: Synthetic peptide
ITMIVVVITT

SEQ ID NO: 4190 - protein, 9 aa, Artificial Sequence
  Description of Artificial Sequence: Synthetic peptide
ITMIVVVIT

SEQ ID NO: 4191 - protein, 9 aa, Artificial Sequence
  Description of Artificial Sequence: Synthetic peptide
TMIVVVITT

SEQ ID NO: 4192 - protein, 8 aa, Artificial Sequence
  Description of Artificial Sequence: Synthetic peptide
ITMIVVVI

SEQ ID NO: 4193 - protein, 8 aa, Artificial Sequence
  Description of Artificial Sequence: Synthetic peptide
TMIVVVIT

SEQ ID NO: 4194 - protein, 8 aa, Artificial Sequence
  Description of Artificial Sequence: Synthetic peptide
MIVVVITT

SEQ ID NO: 4195 - protein, 7 aa, Artificial Sequence
  Description of Artificial Sequence: Synthetic peptide
ITMIVVV

SEQ ID NO: 4196 - protein, 7 aa, Artificial Sequence
  Description of Artificial Sequence: Synthetic peptide
TMIVVVI

SEQ ID NO: 4197 - protein, 7 aa, Artificial Sequence
  Description of Artificial Sequence: Synthetic peptide
MIVVVIT

SEQ ID NO: 4198 - protein, 7 aa, Artificial Sequence
  Description of Artificial Sequence: Synthetic peptide
IVVVITT

SEQ ID NO: 4199 - protein, 6 aa, Artificial Sequence
  Description of Artificial Sequence: Synthetic peptide
ITMIVV

SEQ ID NO: 4200 - protein, 6 aa, Artificial Sequence
  Description of Artificial Sequence: Synthetic peptide
TMIVVV

SEQ ID NO: 4201 - protein, 6 aa, Artificial Sequence
  Description of Artificial Sequence: Synthetic peptide
MIVVVI

SEQ ID NO: 4202 - protein, 6 aa, Artificial Sequence
  Description of Artificial Sequence: Synthetic peptide
IVVVIT

SEQ ID NO: 4203 - protein, 6 aa, Artificial Sequence
  Description of Artificial Sequence: Synthetic peptide
VVVITT

SEQ ID NO: 4204 - protein, 5 aa, Artificial Sequence
  Description of Artificial Sequence: Synthetic peptide
ITMIV

SEQ ID NO: 4205 - protein, 5 aa, Artificial Sequence
  Description of Artificial Sequence: Synthetic peptide
TMIVV

SEQ ID NO: 4206 - protein, 5 aa, Artificial Sequence
  Description of Artificial Sequence: Synthetic peptide
MIVVV

SEQ ID NO: 4207 - protein, 5 aa, Artificial Sequence
  Description of Artificial Sequence: Synthetic peptide
VVVIT

SEQ ID NO: 4208 - protein, 5 aa, Artificial Sequence
  Description of Artificial Sequence: Synthetic peptide
VVITT

SEQ ID NO: 4209 - protein, 4 aa, Artificial Sequence
  Description of Artificial Sequence: Synthetic peptide
ITMI

SEQ ID NO: 4210 - protein, 4 aa, Artificial Sequence
  Description of Artificial Sequence: Synthetic peptide
TMIV

SEQ ID NO: 4211 - protein, 4 aa, Artificial Sequence
  Description of Artificial Sequence: Synthetic peptide
MIVV

SEQ ID NO: 4212 - protein, 4 aa, Artificial Sequence
  Description of Artificial Sequence: Synthetic peptide
VVIT

SEQ ID NO: 4213 - protein, 4 aa, Artificial Sequence
  Description of Artificial Sequence: Synthetic peptide
VITT

SEQ ID NO: 4214 - protein, 10 aa, Artificial Sequence
  Description of Artificial Sequence: Synthetic peptide
VLRFLEWLLY

SEQ ID NO: 4215 - protein, 9 aa, Artificial Sequence
  Description of Artificial Sequence: Synthetic peptide
VLRFLEWLL

SEQ ID NO: 4216 - protein, 9 aa, Artificial Sequence
  Description of Artificial Sequence: Synthetic peptide
LRFLEWLLY

SEQ ID NO: 4217 - protein, 8 aa, Artificial Sequence
  Description of Artificial Sequence: Synthetic peptide
VLRFLEWL

SEQ ID NO: 4218 - protein, 8 aa, Artificial Sequence
  Description of Artificial Sequence: Synthetic peptide
LRFLEWLL

SEQ ID NO: 4219 - protein, 8 aa, Artificial Sequence
  Description of Artificial Sequence: Synthetic peptide
RFLEWLLY

SEQ ID NO: 4220 - protein, 7 aa, Artificial Sequence
  Description of Artificial Sequence: Synthetic peptide
VLRFLEW

SEQ ID NO: 4221 - protein, 7 aa, Artificial Sequence
  Description of Artificial Sequence: Synthetic peptide
LRFLEWL

SEQ ID NO: 4222 - protein, 7 aa, Artificial Sequence
  Description of Artificial Sequence: Synthetic peptide
RFLEWLL

SEQ ID NO: 4223 - protein, 7 aa, Artificial Sequence
  Description of Artificial Sequence: Synthetic peptide
FLEWLLY

SEQ ID NO: 4224 - protein, 6 aa, Artificial Sequence
  Description of Artificial Sequence: Synthetic peptide
VLRFLE

SEQ ID NO: 4225 - protein, 6 aa, Artificial Sequence
  Description of Artificial Sequence: Synthetic peptide
LRFLEW

SEQ ID NO: 4226 - protein, 6 aa, Artificial Sequence
  Description of Artificial Sequence: Synthetic peptide
RFLEWL

SEQ ID NO: 4227 - protein, 6 aa, Artificial Sequence
  Description of Artificial Sequence: Synthetic peptide
FLEWLL

SEQ ID NO: 4228 - protein, 6 aa, Artificial Sequence
  Description of Artificial Sequence: Synthetic peptide
LEWLLY

SEQ ID NO: 4229 - protein, 5 aa, Artificial Sequence
  Description of Artificial Sequence: Synthetic peptide
VLRFL

SEQ ID NO: 4230 - protein, 5 aa, Artificial Sequence
  Description of Artificial Sequence: Synthetic peptide
LRFLE

SEQ ID NO: 4231 - protein, 5 aa, Artificial Sequence
  Description of Artificial Sequence: Synthetic peptide
RFLEW

SEQ ID NO: 4232 - protein, 5 aa, Artificial Sequence
  Description of Artificial Sequence: Synthetic peptide
FLEWL

SEQ ID NO: 4233 - protein, 5 aa, Artificial Sequence
  Description of Artificial Sequence: Synthetic peptide
LEWLL

SEQ ID NO: 4234 - protein, 5 aa, Artificial Sequence
  Description of Artificial Sequence: Synthetic peptide
EWLLY

SEQ ID NO: 4235 - protein, 4 aa, Artificial Sequence
  Description of Artificial Sequence: Synthetic peptide
VLRF

SEQ ID NO: 4236 - protein, 4 aa, Artificial Sequence
  Description of Artificial Sequence: Synthetic peptide
LRFL

SEQ ID NO: 4237 - protein, 4 aa, Artificial Sequence
  Description of Artificial Sequence: Synthetic peptide
RFLE

SEQ ID NO: 4238 - protein, 4 aa, Artificial Sequence
  Description of Artificial Sequence: Synthetic peptide
FLEW

SEQ ID NO: 4239 - protein, 4 aa, Artificial Sequence
  Description of Artificial Sequence: Synthetic peptide
LEWL

SEQ ID NO: 4240 - protein, 4 aa, Artificial Sequence
  Description of Artificial Sequence: Synthetic peptide
EWLL

SEQ ID NO: 4241 - protein, 4 aa, Artificial Sequence
  Description of Artificial Sequence: Synthetic peptide
WLLY

SEQ ID NO: 4242 - protein, 10 aa, Artificial Sequence
  Description of Artificial Sequence: Synthetic peptide
YYDFWSGYYT

SEQ ID NO: 4243 - protein, 9 aa, Artificial Sequence
  Description of Artificial Sequence: Synthetic peptide
YYDFWSGYY

SEQ ID NO: 4244 - protein, 9 aa, Artificial Sequence
  Description of Artificial Sequence: Synthetic peptide
YDFWSGYYT

SEQ ID NO: 4245 - protein, 8 aa, Artificial Sequence
  Description of Artificial Sequence: Synthetic peptide
YYDFWSGY

SEQ ID NO: 4246 - protein, 8 aa, Artificial Sequence
  Description of Artificial Sequence: Synthetic peptide
YDFWSGYY

SEQ ID NO: 4247 - protein, 8 aa, Artificial Sequence
  Description of Artificial Sequence: Synthetic peptide
DFWSGYYT

SEQ ID NO: 4248 - protein, 7 aa, Artificial Sequence
  Description of Artificial Sequence: Synthetic peptide
YYDFWSG

SEQ ID NO: 4249 - protein, 7 aa, Artificial Sequence
  Description of Artificial Sequence: Synthetic peptide
YDFWSGY

SEQ ID NO: 4250 - protein, 7 aa, Artificial Sequence
  Description of Artificial Sequence: Synthetic peptide
DFWSGYY

SEQ ID NO: 4251 - protein, 7 aa, Artificial Sequence
  Description of Artificial Sequence: Synthetic peptide
FWSGYYT

SEQ ID NO: 4252 - protein, 6 aa, Artificial Sequence
  Description of Artificial Sequence: Synthetic peptide
YYDFWS

SEQ ID NO: 4253 - protein, 6 aa, Artificial Sequence
  Description of Artificial Sequence: Synthetic peptide
YDFWSG

SEQ ID NO: 4254 - protein, 6 aa, Artificial Sequence
  Description of Artificial Sequence: Synthetic peptide
DFWSGY

SEQ ID NO: 4255 - protein, 6 aa, Artificial Sequence
  Description of Artificial Sequence: Synthetic peptide
FWSGYY

SEQ ID NO: 4256 - protein, 6 aa, Artificial Sequence
  Description of Artificial Sequence: Synthetic peptide
WSGYYT

SEQ ID NO: 4257 - protein, 5 aa, Artificial Sequence
  Description of Artificial Sequence: Synthetic peptide
YYDFW

SEQ ID NO: 4258 - protein, 5 aa, Artificial Sequence
  Description of Artificial Sequence: Synthetic peptide
YDFWS

SEQ ID NO: 4259 - protein, 5 aa, Artificial Sequence
  Description of Artificial Sequence: Synthetic peptide
DFWSG

SEQ ID NO: 4260 - protein, 5 aa, Artificial Sequence
  Description of Artificial Sequence: Synthetic peptide
FWSGY

SEQ ID NO: 4261 - protein, 5 aa, Artificial Sequence
  Description of Artificial Sequence: Synthetic peptide
WSGYY

SEQ ID NO: 4262 - protein, 5 aa, Artificial Sequence
  Description of Artificial Sequence: Synthetic peptide
SGYYT

SEQ ID NO: 4263 - protein, 4 aa, Artificial Sequence
  Description of Artificial Sequence: Synthetic peptide
YYDF

SEQ ID NO: 4264 - protein, 4 aa, Artificial Sequence
  Description of Artificial Sequence: Synthetic peptide
YDFW

SEQ ID NO: 4265 - protein, 4 aa, Artificial Sequence
  Description of Artificial Sequence: Synthetic peptide
DFWS

SEQ ID NO: 4266 - protein, 4 aa, Artificial Sequence
  Description of Artificial Sequence: Synthetic peptide
FWSG

SEQ ID NO: 4267 - protein, 4 aa, Artificial Sequence
  Description of Artificial Sequence: Synthetic peptide
WSGY

SEQ ID NO: 4268 - protein, 4 aa, Artificial Sequence
  Description of Artificial Sequence: Synthetic peptide
GYYT

SEQ ID NO: 4269 - protein, 10 aa, Artificial Sequence
  Description of Artificial Sequence: Synthetic peptide
ITIFGVVIIP

SEQ ID NO: 4270 - protein, 9 aa, Artificial Sequence
  Description of Artificial Sequence: Synthetic peptide
ITIFGVVII

SEQ ID NO: 4271 - protein, 9 aa, Artificial Sequence
  Description of Artificial Sequence: Synthetic peptide
TIFGVVIIP

SEQ ID NO: 4272 - protein, 8 aa, Artificial Sequence
  Description of Artificial Sequence: Synthetic peptide
ITIFGVVI

SEQ ID NO: 4273 - protein, 8 aa, Artificial Sequence
  Description of Artificial Sequence: Synthetic peptide
TIFGVVII

SEQ ID NO: 4274 - protein, 8 aa, Artificial Sequence
  Description of Artificial Sequence: Synthetic peptide
IFGVVIIP

SEQ ID NO: 4275 - protein, 7 aa, Artificial Sequence
  Description of Artificial Sequence: Synthetic peptide
ITIFGVV

SEQ ID NO: 4276 - protein, 7 aa, Artificial Sequence
  Description of Artificial Sequence: Synthetic peptide
TIFGVVI

SEQ ID NO: 4277 - protein, 7 aa, Artificial Sequence
  Description of Artificial Sequence: Synthetic peptide
IFGVVII

SEQ ID NO: 4278 - protein, 7 aa, Artificial Sequence
  Description of Artificial Sequence: Synthetic peptide
FGVVIIP

SEQ ID NO: 4279 - protein, 6 aa, Artificial Sequence
  Description of Artificial Sequence: Synthetic peptide
ITIFGV

SEQ ID NO: 4280 - protein, 6 aa, Artificial Sequence
  Description of Artificial Sequence: Synthetic peptide
TIFGVV

SEQ ID NO: 4281 - protein, 6 aa, Artificial Sequence
  Description of Artificial Sequence: Synthetic peptide
IFGVVI

SEQ ID NO: 4282 - protein, 6 aa, Artificial Sequence
  Description of Artificial Sequence: Synthetic peptide
FGVVII

SEQ ID NO: 4283 - protein, 6 aa, Artificial Sequence
  Description of Artificial Sequence: Synthetic peptide
GVVIIP

SEQ ID NO: 4284 - protein, 5 aa, Artificial Sequence
  Description of Artificial Sequence: Synthetic peptide
ITIFG

SEQ ID NO: 4285 - protein, 5 aa, Artificial Sequence
  Description of Artificial Sequence: Synthetic peptide
TIFGV

SEQ ID NO: 4286 - protein, 5 aa, Artificial Sequence
  Description of Artificial Sequence: Synthetic peptide
IFGVV

SEQ ID NO: 4287 - protein, 5 aa, Artificial Sequence
  Description of Artificial Sequence: Synthetic peptide
FGVVI

SEQ ID NO: 4288 - protein, 5 aa, Artificial Sequence
  Description of Artificial Sequence: Synthetic peptide
GVVII

SEQ ID NO: 4289 - protein, 5 aa, Artificial Sequence
  Description of Artificial Sequence: Synthetic peptide
VVIIP

SEQ ID NO: 4290 - protein, 4 aa, Artificial Sequence
  Description of Artificial Sequence: Synthetic peptide
ITIF

SEQ ID NO: 4291 - protein, 4 aa, Artificial Sequence
  Description of Artificial Sequence: Synthetic peptide
TIFG

SEQ ID NO: 4292 - protein, 4 aa, Artificial Sequence
  Description of Artificial Sequence: Synthetic peptide
IFGV

SEQ ID NO: 4293 - protein, 4 aa, Artificial Sequence
  Description of Artificial Sequence: Synthetic peptide
FGVV

SEQ ID NO: 4294 - protein, 4 aa, Artificial Sequence
  Description of Artificial Sequence: Synthetic peptide
GVVI

SEQ ID NO: 4295 - protein, 4 aa, Artificial Sequence
  Description of Artificial Sequence: Synthetic peptide
VVII

SEQ ID NO: 4296 - protein, 4 aa, Artificial Sequence
  Description of Artificial Sequence: Synthetic peptide
VIIP

SEQ ID NO: 4297 - protein, 9 aa, Artificial Sequence
  Description of Artificial Sequence: Synthetic peptide
VLRYFDWLL

SEQ ID NO: 4298 - protein, 8 aa, Artificial Sequence
  Description of Artificial Sequence: Synthetic peptide
VLRYFDWL

SEQ ID NO: 4299 - protein, 8 aa, Artificial Sequence
  Description of Artificial Sequence: Synthetic peptide
LRYFDWLL

SEQ ID NO: 4300 - protein, 7 aa, Artificial Sequence
  Description of Artificial Sequence: Synthetic peptide
VLRYFDW

SEQ ID NO: 4301 - protein, 7 aa, Artificial Sequence
  Description of Artificial Sequence: Synthetic peptide
LRYFDWL

SEQ ID NO: 4302 - protein, 7 aa, Artificial Sequence
  Description of Artificial Sequence: Synthetic peptide
RYFDWLL

SEQ ID NO: 4303 - protein, 6 aa, Artificial Sequence
  Description of Artificial Sequence: Synthetic peptide
VLRYFD

SEQ ID NO: 4304 - protein, 6 aa, Artificial Sequence
  Description of Artificial Sequence: Synthetic peptide
LRYFDW

SEQ ID NO: 4305 - protein, 6 aa, Artificial Sequence
  Description of Artificial Sequence: Synthetic peptide
RYFDWL

SEQ ID NO: 4306 - protein, 6 aa, Artificial Sequence
  Description of Artificial Sequence: Synthetic peptide
YFDWLL

SEQ ID NO: 4307 - protein, 5 aa, Artificial Sequence
  Description of Artificial Sequence: Synthetic peptide
VLRYF

SEQ ID NO: 4308 - protein, 5 aa, Artificial Sequence
  Description of Artificial Sequence: Synthetic peptide
LRYFD

SEQ ID NO: 4309 - protein, 5 aa, Artificial Sequence
  Description of Artificial Sequence: Synthetic peptide
RYFDW

SEQ ID NO: 4310 - protein, 5 aa, Artificial Sequence
  Description of Artificial Sequence: Synthetic peptide
YFDWL

SEQ ID NO: 4311 - protein, 5 aa, Artificial Sequence
  Description of Artificial Sequence: Synthetic peptide
FDWLL

SEQ ID NO: 4312 - protein, 4 aa, Artificial Sequence
  Description of Artificial Sequence: Synthetic peptide
VLRY

SEQ ID NO: 4313 - protein, 4 aa, Artificial Sequence
  Description of Artificial Sequence: Synthetic peptide
LRYF

SEQ ID NO: 4314 - protein, 4 aa, Artificial Sequence
  Description of Artificial Sequence: Synthetic peptide
RYFD

SEQ ID NO: 4315 - protein, 4 aa, Artificial Sequence
  Description of Artificial Sequence: Synthetic peptide
YFDW

SEQ ID NO: 4316 - protein, 4 aa, Artificial Sequence
  Description of Artificial Sequence: Synthetic peptide
FDWL

SEQ ID NO: 4317 - protein, 4 aa, Artificial Sequence
  Description of Artificial Sequence: Synthetic peptide
DWLL

SEQ ID NO: 4318 - protein, 10 aa, Artificial Sequence
  Description of Artificial Sequence: Synthetic peptide
YYDILTGYYN

SEQ ID NO: 4319 - protein, 9 aa, Artificial Sequence
  Description of Artificial Sequence: Synthetic peptide
YYDILTGYY

SEQ ID NO: 4320 - protein, 9 aa, Artificial Sequence
  Description of Artificial Sequence: Synthetic peptide
YDILTGYYN

SEQ ID NO: 4321 - protein, 8 aa, Artificial Sequence
  Description of Artificial Sequence: Synthetic peptide
YYDILTGY

SEQ ID NO: 4322 - protein, 8 aa, Artificial Sequence
  Description of Artificial Sequence: Synthetic peptide
YDILTGYY

SEQ ID NO: 4323 - protein, 8 aa, Artificial Sequence
  Description of Artificial Sequence: Synthetic peptide
DILTGYYN

SEQ ID NO: 4324 - protein, 7 aa, Artificial Sequence
  Description of Artificial Sequence: Synthetic peptide
YYDILTG

SEQ ID NO: 4325 - protein, 7 aa, Artificial Sequence
  Description of Artificial Sequence: Synthetic peptide
YDILTGY

SEQ ID NO: 4326 - protein, 7 aa, Artificial Sequence
  Description of Artificial Sequence: Synthetic peptide
DILTGYY

SEQ ID NO: 4327 - protein, 7 aa, Artificial Sequence
  Description of Artificial Sequence: Synthetic peptide
ILTGYYN

SEQ ID NO: 4328 - protein, 6 aa, Artificial Sequence
  Description of Artificial Sequence: Synthetic peptide
YYDILT

SEQ ID NO: 4329 - protein, 6 aa, Artificial Sequence
  Description of Artificial Sequence: Synthetic peptide
YDILTG

SEQ ID NO: 4330 - protein, 6 aa, Artificial Sequence
  Description of Artificial Sequence: Synthetic peptide
DILTGY

SEQ ID NO: 4331 - protein, 6 aa, Artificial Sequence
  Description of Artificial Sequence: Synthetic peptide
ILTGYY

SEQ ID NO: 4332 - protein, 6 aa, Artificial Sequence
  Description of Artificial Sequence: Synthetic peptide
LTGYYN

SEQ ID NO: 4333 - protein, 5 aa, Artificial Sequence
  Description of Artificial Sequence: Synthetic peptide
YYDIL

SEQ ID NO: 4334 - protein, 5 aa, Artificial Sequence
  Description of Artificial Sequence: Synthetic peptide
YDILT

SEQ ID NO: 4335 - protein, 5 aa, Artificial Sequence
  Description of Artificial Sequence: Synthetic peptide
DILTG

SEQ ID NO: 4336 - protein, 5 aa, Artificial Sequence
  Description of Artificial Sequence: Synthetic peptide
ILTGY

SEQ ID NO: 4337 - protein, 5 aa, Artificial Sequence
  Description of Artificial Sequence: Synthetic peptide
LTGYY

SEQ ID NO: 4338 - protein, 5 aa, Artificial Sequence
  Description of Artificial Sequence: Synthetic peptide
TGYYN

SEQ ID NO: 4339 - protein, 4 aa, Artificial Sequence
  Description of Artificial Sequence: Synthetic peptide
YYDI

SEQ ID NO: 4340 - protein, 4 aa, Artificial Sequence
  Description of Artificial Sequence: Synthetic peptide
YDIL

SEQ ID NO: 4341 - protein, 4 aa, Artificial Sequence
  Description of Artificial Sequence: Synthetic peptide
DILT

SEQ ID NO: 4342 - protein, 4 aa, Artificial Sequence
  Description of Artificial Sequence: Synthetic peptide
ILTG

SEQ ID NO: 4343 - protein, 4 aa, Artificial Sequence
  Description of Artificial Sequence: Synthetic peptide
LTGY

SEQ ID NO: 4344 - protein, 4 aa, Artificial Sequence
  Description of Artificial Sequence: Synthetic peptide
TGYY

SEQ ID NO: 4345 - protein, 4 aa, Artificial Sequence
  Description of Artificial Sequence: Synthetic peptide
GYYN

SEQ ID NO: 4346 - protein, 5 aa, Artificial Sequence
  Description of Artificial Sequence: Synthetic peptide
LVIIT

SEQ ID NO: 4347 - protein, 4 aa, Artificial Sequence
  Description of Artificial Sequence: Synthetic peptide
LVII

SEQ ID NO: 4348 - protein, 5 aa, Artificial Sequence
  Description of Artificial Sequence: Synthetic peptide
DYGDY

SEQ ID NO: 4349 - protein, 4 aa, Artificial Sequence
  Description of Artificial Sequence: Synthetic peptide
DYGD

SEQ ID NO: 4350 - protein, 4 aa, Artificial Sequence
  Description of Artificial Sequence: Synthetic peptide
YGDY

SEQ ID NO: 4351 - protein, 5 aa, Artificial Sequence
  Description of Artificial Sequence: Synthetic peptide
TTVTT

SEQ ID NO: 4352 - protein, 4 aa, Artificial Sequence
  Description of Artificial Sequence: Synthetic peptide
TTVT

SEQ ID NO: 4353 - protein, 4 aa, Artificial Sequence
  Description of Artificial Sequence: Synthetic peptide
TVTT

SEQ ID NO: 4354 - protein, 6 aa, Artificial Sequence
  Description of Artificial Sequence: Synthetic peptide
DYGGNS

SEQ ID NO: 4355 - protein, 5 aa, Artificial Sequence
  Description of Artificial Sequence: Synthetic peptide
DYGGN

SEQ ID NO: 4356 - protein, 5 aa, Artificial Sequence
  Description of Artificial Sequence: Synthetic peptide
YGGNS

SEQ ID NO: 4357 - protein, 4 aa, Artificial Sequence
  Description of Artificial Sequence: Synthetic peptide
DYGG

SEQ ID NO: 4358 - protein, 4 aa, Artificial Sequence
  Description of Artificial Sequence: Synthetic peptide
YGGN

SEQ ID NO: 4359 - protein, 4 aa, Artificial Sequence
  Description of Artificial Sequence: Synthetic peptide
GGNS

SEQ ID NO: 4360 - protein, 6 aa, Artificial Sequence
  Description of Artificial Sequence: Synthetic peptide
TTVVTP

SEQ ID NO: 4361 - protein, 5 aa, Artificial Sequence
  Description of Artificial Sequence: Synthetic peptide
TTVVT

SEQ ID NO: 4362 - protein, 5 aa, Artificial Sequence
  Description of Artificial Sequence: Synthetic peptide
TVVTP

SEQ ID NO: 4363 - protein, 4 aa, Artificial Sequence
  Description of Artificial Sequence: Synthetic peptide
TTVV

SEQ ID NO: 4364 - protein, 4 aa, Artificial Sequence
  Description of Artificial Sequence: Synthetic peptide
TVVT

SEQ ID NO: 4365 - protein, 4 aa, Artificial Sequence
  Description of Artificial Sequence: Synthetic peptide
VVTP

SEQ ID NO: 4366 - protein, 5 aa, Artificial Sequence
  Description of Artificial Sequence: Synthetic peptide
DYSNY

SEQ ID NO: 4367 - protein, 4 aa, Artificial Sequence
  Description of Artificial Sequence: Synthetic peptide
DYSN

SEQ ID NO: 4368 - protein, 4 aa, Artificial Sequence
  Description of Artificial Sequence: Synthetic peptide
YSNY

SEQ ID NO: 4369 - protein, 8 aa, Artificial Sequence
  Description of Artificial Sequence: Synthetic peptide
VDIVATIT

SEQ ID NO: 4370 - protein, 7 aa, Artificial Sequence
  Description of Artificial Sequence: Synthetic peptide
VDIVATI

SEQ ID NO: 4371 - protein, 7 aa, Artificial Sequence
  Description of Artificial Sequence: Synthetic peptide
DIVATIT

SEQ ID NO: 4372 - protein, 6 aa, Artificial Sequence
  Description of Artificial Sequence: Synthetic peptide
VDIVAT

SEQ ID NO: 4373 - protein, 6 aa, Artificial Sequence
  Description of Artificial Sequence: Synthetic peptide
DIVATI

SEQ ID NO: 4374 - protein, 6 aa, Artificial Sequence
  Description of Artificial Sequence: Synthetic peptide
IVATIT

SEQ ID NO: 4375 - protein, 5 aa, Artificial Sequence
  Description of Artificial Sequence: Synthetic peptide
VDIVA

SEQ ID NO: 4376 - protein, 5 aa, Artificial Sequence
  Description of Artificial Sequence: Synthetic peptide
DIVAT

SEQ ID NO: 4377 - protein, 5 aa, Artificial Sequence
  Description of Artificial Sequence: Synthetic peptide
IVATI

SEQ ID NO: 4378 - protein, 5 aa, Artificial Sequence
  Description of Artificial Sequence: Synthetic peptide
VATIT

SEQ ID NO: 4379 - protein, 4 aa, Artificial Sequence
  Description of Artificial Sequence: Synthetic peptide
VDIV

SEQ ID NO: 4380 - protein, 4 aa, Artificial Sequence
  Description of Artificial Sequence: Synthetic peptide
DIVA

SEQ ID NO: 4381 - protein, 4 aa, Artificial Sequence
  Description of Artificial Sequence: Synthetic peptide
IVAT

SEQ ID NO: 4382 - protein, 4 aa, Artificial Sequence
  Description of Artificial Sequence: Synthetic peptide
VATI

SEQ ID NO: 4383 - protein, 4 aa, Artificial Sequence
  Description of Artificial Sequence: Synthetic peptide
ATIT

SEQ ID NO: 4384 - protein, 4 aa, Artificial Sequence
  Description of Artificial Sequence: Synthetic peptide
WLRL

SEQ ID NO: 4385 - protein, 7 aa, Artificial Sequence
  Description of Artificial Sequence: Synthetic peptide
GYSGYDY

SEQ ID NO: 4386 - protein, 6 aa, Artificial Sequence
  Description of Artificial Sequence: Synthetic peptide
GYSGYD

SEQ ID NO: 4387 - protein, 6 aa, Artificial Sequence
  Description of Artificial Sequence: Synthetic peptide
YSGYDY

SEQ ID NO: 4388 - protein, 5 aa, Artificial Sequence
  Description of Artificial Sequence: Synthetic peptide
GYSGY

SEQ ID NO: 4389 - protein, 5 aa, Artificial Sequence
  Description of Artificial Sequence: Synthetic peptide
YSGYD

SEQ ID NO: 4390 - protein, 5 aa, Artificial Sequence
  Description of Artificial Sequence: Synthetic peptide
SGYDY

SEQ ID NO: 4391 - protein, 4 aa, Artificial Sequence
  Description of Artificial Sequence: Synthetic peptide
GYSG

SEQ ID NO: 4392 - protein, 4 aa, Artificial Sequence
  Description of Artificial Sequence: Synthetic peptide
YSGY

SEQ ID NO: 4393 - protein, 4 aa, Artificial Sequence
  Description of Artificial Sequence: Synthetic peptide
SGYD

SEQ ID NO: 4394 - protein, 4 aa, Artificial Sequence
  Description of Artificial Sequence: Synthetic peptide
GYDY

SEQ ID NO: 4395 - protein, 7 aa, Artificial Sequence
  Description of Artificial Sequence: Synthetic peptide
VEMATIT

SEQ ID NO: 4396 - protein, 6 aa, Artificial Sequence
  Description of Artificial Sequence: Synthetic peptide
VEMATI

SEQ ID NO: 4397 - protein, 6 aa, Artificial Sequence
  Description of Artificial Sequence: Synthetic peptide
EMATIT

SEQ ID NO: 4398 - protein, 5 aa, Artificial Sequence
  Description of Artificial Sequence: Synthetic peptide
VEMAT

SEQ ID NO: 4399 - protein, 5 aa, Artificial Sequence
  Description of Artificial Sequence: Synthetic peptide
EMATI

SEQ ID NO: 4400 - protein, 5 aa, Artificial Sequence
  Description of Artificial Sequence: Synthetic peptide
MATIT

SEQ ID NO: 4401 - protein, 4 aa, Artificial Sequence
  Description of Artificial Sequence: Synthetic peptide
VEMA

SEQ ID NO: 4402 - protein, 4 aa, Artificial Sequence
  Description of Artificial Sequence: Synthetic peptide
EMAT

SEQ ID NO: 4403 - protein, 4 aa, Artificial Sequence
  Description of Artificial Sequence: Synthetic peptide
MATI

SEQ ID NO: 4404 - protein, 5 aa, Artificial Sequence
  Description of Artificial Sequence: Synthetic peptide
RWLQL

SEQ ID NO: 4405 - protein, 4 aa, Artificial Sequence
  Description of Artificial Sequence: Synthetic peptide
RWLQ

SEQ ID NO: 4406 - protein, 4 aa, Artificial Sequence
  Description of Artificial Sequence: Synthetic peptide
WLQL

SEQ ID NO: 4407 - protein, 6 aa, Artificial Sequence
  Description of Artificial Sequence: Synthetic peptide
RDGYNY

SEQ ID NO: 4408 - protein, 5 aa, Artificial Sequence
  Description of Artificial Sequence: Synthetic peptide
RDGYN

SEQ ID NO: 4409 - protein, 5 aa, Artificial Sequence
  Description of Artificial Sequence: Synthetic peptide
DGYNY

SEQ ID NO: 4410 - protein, 4 aa, Artificial Sequence
  Description of Artificial Sequence: Synthetic peptide
RDGY

SEQ ID NO: 4411 - protein, 4 aa, Artificial Sequence
  Description of Artificial Sequence: Synthetic peptide
DGYN

SEQ ID NO: 4412 - protein, 4 aa, Artificial Sequence
  Description of Artificial Sequence: Synthetic peptide
GYNY

SEQ ID NO: 4413 - protein, 7 aa, Artificial Sequence
  Description of Artificial Sequence: Synthetic peptide
VDTAMVT

SEQ ID NO: 4414 - protein, 6 aa, Artificial Sequence
  Description of Artificial Sequence: Synthetic peptide
VDTAMV

SEQ ID NO: 4415 - protein, 6 aa, Artificial Sequence
  Description of Artificial Sequence: Synthetic peptide
DTAMVT

SEQ ID NO: 4416 - protein, 5 aa, Artificial Sequence
  Description of Artificial Sequence: Synthetic peptide
VDTAM

SEQ ID NO: 4417 - protein, 5 aa, Artificial Sequence
  Description of Artificial Sequence: Synthetic peptide
DTAMV

SEQ ID NO: 4418 - protein, 5 aa, Artificial Sequence
  Description of Artificial Sequence: Synthetic peptide
TAMVT

SEQ ID NO: 4419 - protein, 4 aa, Artificial Sequence
  Description of Artificial Sequence: Synthetic peptide
VDTA

SEQ ID NO: 4420 - protein, 4 aa, Artificial Sequence
  Description of Artificial Sequence: Synthetic peptide
DTAM

SEQ ID NO: 4421 - protein, 4 aa, Artificial Sequence
  Description of Artificial Sequence: Synthetic peptide
TAMV

SEQ ID NO: 4422 - protein, 4 aa, Artificial Sequence
  Description of Artificial Sequence: Synthetic peptide
AMVT

SEQ ID NO: 4423 - protein, 6 aa, Artificial Sequence
  Description of Artificial Sequence: Synthetic peptide
WIQLWL

SEQ ID NO: 4424 - protein, 5 aa, Artificial Sequence
  Description of Artificial Sequence: Synthetic peptide
WIQLW

SEQ ID NO: 4425 - protein, 5 aa, Artificial Sequence
  Description of Artificial Sequence: Synthetic peptide
IQLWL

SEQ ID NO: 4426 - protein, 4 aa, Artificial Sequence
  Description of Artificial Sequence: Synthetic peptide
WIQL

SEQ ID NO: 4427 - protein, 4 aa, Artificial Sequence
  Description of Artificial Sequence: Synthetic peptide
IQLW

SEQ ID NO: 4428 - protein, 4 aa, Artificial Sequence
  Description of Artificial Sequence: Synthetic peptide
QLWL

SEQ ID NO: 4429 - protein, 6 aa, Artificial Sequence
  Description of Artificial Sequence: Synthetic peptide
GYSYGY

SEQ ID NO: 4430 - protein, 5 aa, Artificial Sequence
  Description of Artificial Sequence: Synthetic peptide
GYSYG

SEQ ID NO: 4431 - protein, 5 aa, Artificial Sequence
  Description of Artificial Sequence: Synthetic peptide
YSYGY

SEQ ID NO: 4432 - protein, 4 aa, Artificial Sequence
  Description of Artificial Sequence: Synthetic peptide
GYSY

SEQ ID NO: 4433 - protein, 4 aa, Artificial Sequence
  Description of Artificial Sequence: Synthetic peptide
YSYG

SEQ ID NO: 4434 - protein, 4 aa, Artificial Sequence
  Description of Artificial Sequence: Synthetic peptide
SYGY

SEQ ID NO: 4435 - protein, 7 aa, Artificial Sequence
  Description of Artificial Sequence: Synthetic peptide
GYSSSWY

SEQ ID NO: 4436 - protein, 6 aa, Artificial Sequence
  Description of Artificial Sequence: Synthetic peptide
GYSSSW

SEQ ID NO: 4437 - protein, 6 aa, Artificial Sequence
  Description of Artificial Sequence: Synthetic peptide
YSSSWY

SEQ ID NO: 4438 - protein, 5 aa, Artificial Sequence
  Description of Artificial Sequence: Synthetic peptide
GYSSS

SEQ ID NO: 4439 - protein, 5 aa, Artificial Sequence
  Description of Artificial Sequence: Synthetic peptide
YSSSW

SEQ ID NO: 4440 - protein, 5 aa, Artificial Sequence
  Description of Artificial Sequence: Synthetic peptide
SSSWY

SEQ ID NO: 4441 - protein, 4 aa, Artificial Sequence
  Description of Artificial Sequence: Synthetic peptide
GYSS

SEQ ID NO: 4442 - protein, 4 aa, Artificial Sequence
  Description of Artificial Sequence: Synthetic peptide
YSSS

SEQ ID NO: 4443 - protein, 4 aa, Artificial Sequence
  Description of Artificial Sequence: Synthetic peptide
SSSW

SEQ ID NO: 4444 - protein, 4 aa, Artificial Sequence
  Description of Artificial Sequence: Synthetic peptide
SSWY

SEQ ID NO: 4445 - protein, 7 aa, Artificial Sequence
  Description of Artificial Sequence: Synthetic peptide
GIAAAGT

SEQ ID NO: 4446 - protein, 6 aa, Artificial Sequence
  Description of Artificial Sequence: Synthetic peptide
GIAAAG

SEQ ID NO: 4447 - protein, 6 aa, Artificial Sequence
  Description of Artificial Sequence: Synthetic peptide
IAAAGT

SEQ ID NO: 4448 - protein, 5 aa, Artificial Sequence
  Description of Artificial Sequence: Synthetic peptide
GIAAA

SEQ ID NO: 4449 - protein, 5 aa, Artificial Sequence
  Description of Artificial Sequence: Synthetic peptide
IAAAG

SEQ ID NO: 4450 - protein, 5 aa, Artificial Sequence
  Description of Artificial Sequence: Synthetic peptide
AAAGT

SEQ ID NO: 4451 - protein, 4 aa, Artificial Sequence
  Description of Artificial Sequence: Synthetic peptide
GIAA

SEQ ID NO: 4452 - protein, 4 aa, Artificial Sequence
  Description of Artificial Sequence: Synthetic peptide
IAAA

SEQ ID NO: 4453 - protein, 4 aa, Artificial Sequence
  Description of Artificial Sequence: Synthetic peptide
AAAG

SEQ ID NO: 4454 - protein, 4 aa, Artificial Sequence
  Description of Artificial Sequence: Synthetic peptide
AAGT

SEQ ID NO: 4455 - protein, 4 aa, Artificial Sequence
  Description of Artificial Sequence: Synthetic peptide
QQLV

SEQ ID NO: 4456 - protein, 7 aa, Artificial Sequence
  Description of Artificial Sequence: Synthetic peptide
GYSSGWY

SEQ ID NO: 4457 - protein, 6 aa, Artificial Sequence
  Description of Artificial Sequence: Synthetic peptide
GYSSGW

SEQ ID NO: 4458 - protein, 6 aa, Artificial Sequence
  Description of Artificial Sequence: Synthetic peptide
YSSGWY

SEQ ID NO: 4459 - protein, 5 aa, Artificial Sequence
  Description of Artificial Sequence: Synthetic peptide
GYSSG

SEQ ID NO: 4460 - protein, 5 aa, Artificial Sequence
  Description of Artificial Sequence: Synthetic peptide
YSSGW

SEQ ID NO: 4461 - protein, 5 aa, Artificial Sequence
  Description of Artificial Sequence: Synthetic peptide
SSGWY

SEQ ID NO: 4462 - protein, 4 aa, Artificial Sequence
  Description of Artificial Sequence: Synthetic peptide
YSSG

SEQ ID NO: 4463 - protein, 4 aa, Artificial Sequence
  Description of Artificial Sequence: Synthetic peptide
SSGW

SEQ ID NO: 4464 - protein, 4 aa, Artificial Sequence
  Description of Artificial Sequence: Synthetic peptide
SGWY

SEQ ID NO: 4465 - protein, 7 aa, Artificial Sequence
  Description of Artificial Sequence: Synthetic peptide
GIAVAGT

SEQ ID NO: 4466 - protein, 6 aa, Artificial Sequence
  Description of Artificial Sequence: Synthetic peptide
GIAVAG

SEQ ID NO: 4467 - protein, 6 aa, Artificial Sequence
  Description of Artificial Sequence: Synthetic peptide
IAVAGT

SEQ ID NO: 4468 - protein, 5 aa, Artificial Sequence
  Description of Artificial Sequence: Synthetic peptide
GIAVA

SEQ ID NO: 4469 - protein, 5 aa, Artificial Sequence
  Description of Artificial Sequence: Synthetic peptide
IAVAG

SEQ ID NO: 4470 - protein, 5 aa, Artificial Sequence
  Description of Artificial Sequence: Synthetic peptide
AVAGT

SEQ ID NO: 4471 - protein, 4 aa, Artificial Sequence
  Description of Artificial Sequence: Synthetic peptide
GIAV

SEQ ID NO: 4472 - protein, 4 aa, Artificial Sequence
  Description of Artificial Sequence: Synthetic peptide
IAVA

SEQ ID NO: 4473 - protein, 4 aa, Artificial Sequence
  Description of Artificial Sequence: Synthetic peptide
AVAG

SEQ ID NO: 4474 - protein, 4 aa, Artificial Sequence
  Description of Artificial Sequence: Synthetic peptide
VAGT

SEQ ID NO: 4475 - protein, 4 aa, Artificial Sequence
  Description of Artificial Sequence: Synthetic peptide
QWLV

SEQ ID NO: 4476 - protein, 6 aa, Artificial Sequence
  Description of Artificial Sequence: Synthetic peptide
EYSSSS

SEQ ID NO: 4477 - protein, 5 aa, Artificial Sequence
  Description of Artificial Sequence: Synthetic peptide
EYSSS

SEQ ID NO: 4478 - protein, 5 aa, Artificial Sequence
  Description of Artificial Sequence: Synthetic peptide
YSSSS

SEQ ID NO: 4479 - protein, 4 aa, Artificial Sequence
  Description of Artificial Sequence: Synthetic peptide
EYSS

SEQ ID NO: 4480 - protein, 4 aa, Artificial Sequence
  Description of Artificial Sequence: Synthetic peptide
SSSS

SEQ ID NO: 4481 - protein, 6 aa, Artificial Sequence
  Description of Artificial Sequence: Synthetic peptide
SIAARP

SEQ ID NO: 4482 - protein, 5 aa, Artificial Sequence
  Description of Artificial Sequence: Synthetic peptide
SIAAR

SEQ ID NO: 4483 - protein, 5 aa, Artificial Sequence
  Description of Artificial Sequence: Synthetic peptide
IAARP

SEQ ID NO: 4484 - protein, 4 aa, Artificial Sequence
  Description of Artificial Sequence: Synthetic peptide
SIAA

SEQ ID NO: 4485 - protein, 4 aa, Artificial Sequence
  Description of Artificial Sequence: Synthetic peptide
IAAR

SEQ ID NO: 4486 - protein, 4 aa, Artificial Sequence
  Description of Artificial Sequence: Synthetic peptide
AARP

SEQ ID NO: 4487 - protein, 6 aa, Artificial Sequence
  Description of Artificial Sequence: Synthetic peptide
TEYFQH

SEQ ID NO: 4488 - protein, 5 aa, Artificial Sequence
  Description of Artificial Sequence: Synthetic peptide
EYFQH

SEQ ID NO: 4489 - protein, 4 aa, Artificial Sequence
  Description of Artificial Sequence: Synthetic peptide
YFQH

SEQ ID NO: 4490 - protein, 6 aa, Artificial Sequence
  Description of Artificial Sequence: Synthetic peptide
SEYFQH

SEQ ID NO: 4491 - protein, 6 aa, Artificial Sequence
  Description of Artificial Sequence: Synthetic peptide
PEYFQH

SEQ ID NO: 4492 - protein, 6 aa, Artificial Sequence
  Description of Artificial Sequence: Synthetic peptide
FEYFQH

SEQ ID NO: 4493 - protein, 6 aa, Artificial Sequence
  Description of Artificial Sequence: Synthetic peptide
HEYFQH

SEQ ID NO: 4494 - protein, 6 aa, Artificial Sequence
  Description of Artificial Sequence: Synthetic peptide
REYFQH

SEQ ID NO: 4495 - protein, 6 aa, Artificial Sequence
  Description of Artificial Sequence: Synthetic peptide
LEYFQH

SEQ ID NO: 4496 - protein, 6 aa, Artificial Sequence
  Description of Artificial Sequence: Synthetic peptide
NEYFQH

SEQ ID NO: 4497 - protein, 6 aa, Artificial Sequence
  Description of Artificial Sequence: Synthetic peptide
IEYFQH

SEQ ID NO: 4498 - protein, 6 aa, Artificial Sequence
  Description of Artificial Sequence: Synthetic peptide
DEYFQH

SEQ ID NO: 4499 - protein, 6 aa, Artificial Sequence
  Description of Artificial Sequence: Synthetic peptide
GEYFQH

SEQ ID NO: 4500 - protein, 6 aa, Artificial Sequence
  Description of Artificial Sequence: Synthetic peptide
VEYFQH

SEQ ID NO: 4501 - protein, 6 aa, Artificial Sequence
  Description of Artificial Sequence: Synthetic peptide
YEYFQH

SEQ ID NO: 4502 - protein, 5 aa, Artificial Sequence
  Description of Artificial Sequence: Synthetic peptide
KYFQH

SEQ ID NO: 4503 - protein, 5 aa, Artificial Sequence
  Description of Artificial Sequence: Synthetic peptide
QYFQH

SEQ ID NO: 4504 - protein, 5 aa, Artificial Sequence
  Description of Artificial Sequence: Synthetic peptide
LYFQH

SEQ ID NO: 4505 - protein, 5 aa, Artificial Sequence
  Description of Artificial Sequence: Synthetic peptide
SYFQH

SEQ ID NO: 4506 - protein, 5 aa, Artificial Sequence
  Description of Artificial Sequence: Synthetic peptide
RYFQH

SEQ ID NO: 4507 - protein, 5 aa, Artificial Sequence
  Description of Artificial Sequence: Synthetic peptide
PYFQH

SEQ ID NO: 4508 - protein, 5 aa, Artificial Sequence
  Description of Artificial Sequence: Synthetic peptide
IYFQH

SEQ ID NO: 4509 - protein, 5 aa, Artificial Sequence
  Description of Artificial Sequence: Synthetic peptide
TYFQH

SEQ ID NO: 4510 - protein, 5 aa, Artificial Sequence
  Description of Artificial Sequence: Synthetic peptide
GYFQH

SEQ ID NO: 4511 - protein, 5 aa, Artificial Sequence
  Description of Artificial Sequence: Synthetic peptide
VYFQH

SEQ ID NO: 4512 - protein, 5 aa, Artificial Sequence
  Description of Artificial Sequence: Synthetic peptide
AYFQH

SEQ ID NO: 4513 - protein, 4 aa, Artificial Sequence
  Description of Artificial Sequence: Synthetic peptide
NFQH

SEQ ID NO: 4514 - protein, 4 aa, Artificial Sequence
  Description of Artificial Sequence: Synthetic peptide
DFQH

SEQ ID NO: 4515 - protein, 4 aa, Artificial Sequence
  Description of Artificial Sequence: Synthetic peptide
HFQH

SEQ ID NO: 4516 - protein, 4 aa, Artificial Sequence
  Description of Artificial Sequence: Synthetic peptide
FFQH

SEQ ID NO: 4517 - protein, 4 aa, Artificial Sequence
  Description of Artificial Sequence: Synthetic peptide
SFQH

SEQ ID NO: 4518 - protein, 4 aa, Artificial Sequence
  Description of Artificial Sequence: Synthetic peptide
RFQH

SEQ ID NO: 4519 - protein, 4 aa, Artificial Sequence
  Description of Artificial Sequence: Synthetic peptide
LFQH

SEQ ID NO: 4520 - protein, 4 aa, Artificial Sequence
  Description of Artificial Sequence: Synthetic peptide
PFQH

SEQ ID NO: 4521 - protein, 4 aa, Artificial Sequence
  Description of Artificial Sequence: Synthetic peptide
IFQH

SEQ ID NO: 4522 - protein, 4 aa, Artificial Sequence
  Description of Artificial Sequence: Synthetic peptide
TFQH

SEQ ID NO: 4523 - protein, 4 aa, Artificial Sequence
  Description of Artificial Sequence: Synthetic peptide
GFQH

SEQ ID NO: 4524 - protein, 4 aa, Artificial Sequence
  Description of Artificial Sequence: Synthetic peptide
VFQH

SEQ ID NO: 4525 - protein, 4 aa, Artificial Sequence
  Description of Artificial Sequence: Synthetic peptide
AFQH

SEQ ID NO: 4526 - protein, 6 aa, Artificial Sequence
  Description of Artificial Sequence: Synthetic peptide
AEYFQH

SEQ ID NO: 4527 - protein, 6 aa, Artificial Sequence
  Description of Artificial Sequence: Synthetic peptide
YWYFDL

SEQ ID NO: 4528 - protein, 5 aa, Artificial Sequence
  Description of Artificial Sequence: Synthetic peptide
WYFDL

SEQ ID NO: 4529 - protein, 4 aa, Artificial Sequence
  Description of Artificial Sequence: Synthetic peptide
YFDL

SEQ ID NO: 4530 - protein, 6 aa, Artificial Sequence
  Description of Artificial Sequence: Synthetic peptide
DWYFDL

SEQ ID NO: 4531 - protein, 6 aa, Artificial Sequence
  Description of Artificial Sequence: Synthetic peptide
HWYFDL

SEQ ID NO: 4532 - protein, 6 aa, Artificial Sequence
  Description of Artificial Sequence: Synthetic peptide
NWYFDL

SEQ ID NO: 4533 - protein, 5 aa, Artificial Sequence
  Description of Artificial Sequence: Synthetic peptide
GYFDL

SEQ ID NO: 4534 - protein, 5 aa, Artificial Sequence
  Description of Artificial Sequence: Synthetic peptide
RYFDL

SEQ ID NO: 4535 - protein, 4 aa, Artificial Sequence
  Description of Artificial Sequence: Synthetic peptide
HFDL

SEQ ID NO: 4536 - protein, 4 aa, Artificial Sequence
  Description of Artificial Sequence: Synthetic peptide
NFDL

SEQ ID NO: 4537 - protein, 4 aa, Artificial Sequence
  Description of Artificial Sequence: Synthetic peptide
DFDL

SEQ ID NO: 4538 - protein, 5 aa, Artificial Sequence
  Description of Artificial Sequence: Synthetic peptide
DAFDI

SEQ ID NO: 4539 - protein, 4 aa, Artificial Sequence
  Description of Artificial Sequence: Synthetic peptide
AFDI

SEQ ID NO: 4540 - protein, 5 aa, Artificial Sequence
  Description of Artificial Sequence: Synthetic peptide
YAFDI

SEQ ID NO: 4541 - protein, 5 aa, Artificial Sequence
  Description of Artificial Sequence: Synthetic peptide
HAFDI

SEQ ID NO: 4542 - protein, 5 aa, Artificial Sequence
  Description of Artificial Sequence: Synthetic peptide
FAFDI

SEQ ID NO: 4543 - protein, 5 aa, Artificial Sequence
  Description of Artificial Sequence: Synthetic peptide
SAFDI

SEQ ID NO: 4544 - protein, 5 aa, Artificial Sequence
  Description of Artificial Sequence: Synthetic peptide
RAFDI

SEQ ID NO: 4545 - protein, 5 aa, Artificial Sequence
  Description of Artificial Sequence: Synthetic peptide
LAFDI

SEQ ID NO: 4546 - protein, 5 aa, Artificial Sequence
  Description of Artificial Sequence: Synthetic peptide
PAFDI

SEQ ID NO: 4547 - protein, 5 aa, Artificial Sequence
  Description of Artificial Sequence: Synthetic peptide
IAFDI

SEQ ID NO: 4548 - protein, 5 aa, Artificial Sequence
  Description of Artificial Sequence: Synthetic peptide
TAFDI

SEQ ID NO: 4549 - protein, 5 aa, Artificial Sequence
  Description of Artificial Sequence: Synthetic peptide
GAFDI

SEQ ID NO: 4550 - protein, 5 aa, Artificial Sequence
  Description of Artificial Sequence: Synthetic peptide
VAFDI

SEQ ID NO: 4551 - protein, 5 aa, Artificial Sequence
  Description of Artificial Sequence: Synthetic peptide
AAFDI

SEQ ID NO: 4552 - protein, 4 aa, Artificial Sequence
  Description of Artificial Sequence: Synthetic peptide
TFDI

SEQ ID NO: 4553 - protein, 4 aa, Artificial Sequence
  Description of Artificial Sequence: Synthetic peptide
SFDI

SEQ ID NO: 4554 - protein, 4 aa, Artificial Sequence
  Description of Artificial Sequence: Synthetic peptide
PFDI

SEQ ID NO: 4555 - protein, 4 aa, Artificial Sequence
  Description of Artificial Sequence: Synthetic peptide
FFDI

SEQ ID NO: 4556 - protein, 4 aa, Artificial Sequence
  Description of Artificial Sequence: Synthetic peptide
HFDI

SEQ ID NO: 4557 - protein, 4 aa, Artificial Sequence
  Description of Artificial Sequence: Synthetic peptide
RFDI

SEQ ID NO: 4558 - protein, 4 aa, Artificial Sequence
  Description of Artificial Sequence: Synthetic peptide
LFDI

SEQ ID NO: 4559 - protein, 4 aa, Artificial Sequence
  Description of Artificial Sequence: Synthetic peptide
NFDI

SEQ ID NO: 4560 - protein, 4 aa, Artificial Sequence
  Description of Artificial Sequence: Synthetic peptide
IFDI

SEQ ID NO: 4561 - protein, 4 aa, Artificial Sequence
  Description of Artificial Sequence: Synthetic peptide
DFDI

SEQ ID NO: 4562 - protein, 4 aa, Artificial Sequence
  Description of Artificial Sequence: Synthetic peptide
GFDI

SEQ ID NO: 4563 - protein, 4 aa, Artificial Sequence
  Description of Artificial Sequence: Synthetic peptide
VFDI

SEQ ID NO: 4564 - protein, 4 aa, Artificial Sequence
  Description of Artificial Sequence: Synthetic peptide
YFDI

SEQ ID NO: 4565 - protein, 5 aa, Artificial Sequence
  Description of Artificial Sequence: Synthetic peptide
NAFDI

SEQ ID NO: 4566 - protein, 5 aa, Artificial Sequence
  Description of Artificial Sequence: Synthetic peptide
DYFDY

SEQ ID NO: 4567 - protein, 4 aa, Artificial Sequence
  Description of Artificial Sequence: Synthetic peptide
YFDY

SEQ ID NO: 4568 - protein, 5 aa, Artificial Sequence
  Description of Artificial Sequence: Synthetic peptide
YYFDY

SEQ ID NO: 4569 - protein, 5 aa, Artificial Sequence
  Description of Artificial Sequence: Synthetic peptide
HYFDY

SEQ ID NO: 4570 - protein, 5 aa, Artificial Sequence
  Description of Artificial Sequence: Synthetic peptide
FYFDY

SEQ ID NO: 4571 - protein, 5 aa, Artificial Sequence
  Description of Artificial Sequence: Synthetic peptide
SYFDY

SEQ ID NO: 4572 - protein, 5 aa, Artificial Sequence
  Description of Artificial Sequence: Synthetic peptide
RYFDY

SEQ ID NO: 4573 - protein, 5 aa, Artificial Sequence
  Description of Artificial Sequence: Synthetic peptide
LYFDY

SEQ ID NO: 4574 - protein, 5 aa, Artificial Sequence
  Description of Artificial Sequence: Synthetic peptide
PYFDY

SEQ ID NO: 4575 - protein, 5 aa, Artificial Sequence
  Description of Artificial Sequence: Synthetic peptide
IYFDY

SEQ ID NO: 4576 - protein, 5 aa, Artificial Sequence
  Description of Artificial Sequence: Synthetic peptide
TYFDY

SEQ ID NO: 4577 - protein, 5 aa, Artificial Sequence
  Description of Artificial Sequence: Synthetic peptide
GYFDY

SEQ ID NO: 4578 - protein, 5 aa, Artificial Sequence
  Description of Artificial Sequence: Synthetic peptide
VYFDY

SEQ ID NO: 4579 - protein, 5 aa, Artificial Sequence
  Description of Artificial Sequence: Synthetic peptide
AYFDY

SEQ ID NO: 4580 - protein, 4 aa, Artificial Sequence
  Description of Artificial Sequence: Synthetic peptide
NFDY

SEQ ID NO: 4581 - protein, 4 aa, Artificial Sequence
  Description of Artificial Sequence: Synthetic peptide
DFDY

SEQ ID NO: 4582 - protein, 4 aa, Artificial Sequence
  Description of Artificial Sequence: Synthetic peptide
HFDY

SEQ ID NO: 4583 - protein, 4 aa, Artificial Sequence
  Description of Artificial Sequence: Synthetic peptide
FFDY

SEQ ID NO: 4584 - protein, 4 aa, Artificial Sequence
  Description of Artificial Sequence: Synthetic peptide
SFDY

SEQ ID NO: 4585 - protein, 4 aa, Artificial Sequence
  Description of Artificial Sequence: Synthetic peptide
RFDY

SEQ ID NO: 4586 - protein, 4 aa, Artificial Sequence
  Description of Artificial Sequence: Synthetic peptide
LFDY

SEQ ID NO: 4587 - protein, 4 aa, Artificial Sequence
  Description of Artificial Sequence: Synthetic peptide
PFDY

SEQ ID NO: 4588 - protein, 4 aa, Artificial Sequence
  Description of Artificial Sequence: Synthetic peptide
IFDY

SEQ ID NO: 4589 - protein, 4 aa, Artificial Sequence
  Description of Artificial Sequence: Synthetic peptide
TFDY

SEQ ID NO: 4590 - protein, 4 aa, Artificial Sequence
  Description of Artificial Sequence: Synthetic peptide
GFDY

SEQ ID NO: 4591 - protein, 4 aa, Artificial Sequence
  Description of Artificial Sequence: Synthetic peptide
VFDY

SEQ ID NO: 4592 - protein, 4 aa, Artificial Sequence
  Description of Artificial Sequence: Synthetic peptide
AFDY

SEQ ID NO: 4593 - protein, 5 aa, Artificial Sequence
  Description of Artificial Sequence: Synthetic peptide
NYFDY

SEQ ID NO: 4594 - protein, 6 aa, Artificial Sequence
  Description of Artificial Sequence: Synthetic peptide
DNWFDP

SEQ ID NO: 4595 - protein, 5 aa, Artificial Sequence
  Description of Artificial Sequence: Synthetic peptide
NWFDP

SEQ ID NO: 4596 - protein, 4 aa, Artificial Sequence
  Description of Artificial Sequence: Synthetic peptide
WFDP

SEQ ID NO: 4597 - protein, 6 aa, Artificial Sequence
  Description of Artificial Sequence: Synthetic peptide
YNWFDP

SEQ ID NO: 4598 - protein, 6 aa, Artificial Sequence
  Description of Artificial Sequence: Synthetic peptide
HNWFDP

SEQ ID NO: 4599 - protein, 6 aa, Artificial Sequence
  Description of Artificial Sequence: Synthetic peptide
FNWFDP

SEQ ID NO: 4600 - protein, 6 aa, Artificial Sequence
  Description of Artificial Sequence: Synthetic peptide
SNWFDP

SEQ ID NO: 4601 - protein, 6 aa, Artificial Sequence
  Description of Artificial Sequence: Synthetic peptide
RNWFDP

SEQ ID NO: 4602 - protein, 6 aa, Artificial Sequence
  Description of Artificial Sequence: Synthetic peptide
LNWFDP

SEQ ID NO: 4603 - protein, 6 aa, Artificial Sequence
  Description of Artificial Sequence: Synthetic peptide
PNWFDP

SEQ ID NO: 4604 - protein, 6 aa, Artificial Sequence
  Description of Artificial Sequence: Synthetic peptide
INWFDP

SEQ ID NO: 4605 - protein, 6 aa, Artificial Sequence
  Description of Artificial Sequence: Synthetic peptide
TNWFDP

SEQ ID NO: 4606 - protein, 6 aa, Artificial Sequence
  Description of Artificial Sequence: Synthetic peptide
GNWFDP

SEQ ID NO: 4607 - protein, 6 aa, Artificial Sequence
  Description of Artificial Sequence: Synthetic peptide
VNWFDP

SEQ ID NO: 4608 - protein, 6 aa, Artificial Sequence
  Description of Artificial Sequence: Synthetic peptide
ANWFDP

SEQ ID NO: 4609 - protein, 5 aa, Artificial Sequence
  Description of Artificial Sequence: Synthetic peptide
DWFDP

SEQ ID NO: 4610 - protein, 5 aa, Artificial Sequence
  Description of Artificial Sequence: Synthetic peptide
YWFDP

SEQ ID NO: 4611 - protein, 5 aa, Artificial Sequence
  Description of Artificial Sequence: Synthetic peptide
HWFDP

SEQ ID NO: 4612 - protein, 5 aa, Artificial Sequence
  Description of Artificial Sequence: Synthetic peptide
FWFDP

SEQ ID NO: 4613 - protein, 5 aa, Artificial Sequence
  Description of Artificial Sequence: Synthetic peptide
SWFDP

SEQ ID NO: 4614 - protein, 5 aa, Artificial Sequence
  Description of Artificial Sequence: Synthetic peptide
RWFDP

SEQ ID NO: 4615 - protein, 5 aa, Artificial Sequence
  Description of Artificial Sequence: Synthetic peptide
LWFDP

SEQ ID NO: 4616 - protein, 5 aa, Artificial Sequence
  Description of Artificial Sequence: Synthetic peptide
PWFDP

SEQ ID NO: 4617 - protein, 5 aa, Artificial Sequence
  Description of Artificial Sequence: Synthetic peptide
IWFDP

SEQ ID NO: 4618 - protein, 5 aa, Artificial Sequence
  Description of Artificial Sequence: Synthetic peptide
TWFDP

SEQ ID NO: 4619 - protein, 5 aa, Artificial Sequence
  Description of Artificial Sequence: Synthetic peptide
GWFDP

SEQ ID NO: 4620 - protein, 5 aa, Artificial Sequence
  Description of Artificial Sequence: Synthetic peptide
VWFDP

SEQ ID NO: 4621 - protein, 5 aa, Artificial Sequence
  Description of Artificial Sequence: Synthetic peptide
AWFDP

SEQ ID NO: 4622 - protein, 4 aa, Artificial Sequence
  Description of Artificial Sequence: Synthetic peptide
RFDP

SEQ ID NO: 4623 - protein, 4 aa, Artificial Sequence
  Description of Artificial Sequence: Synthetic peptide
GFDP

SEQ ID NO: 4624 - protein, 4 aa, Artificial Sequence
  Description of Artificial Sequence: Synthetic peptide
LFDP

SEQ ID NO: 4625 - protein, 4 aa, Artificial Sequence
  Description of Artificial Sequence: Synthetic peptide
SFDP

SEQ ID NO: 4626 - protein, 4 aa, Artificial Sequence
  Description of Artificial Sequence: Synthetic peptide
QFDP

SEQ ID NO: 4627 - protein, 4 aa, Artificial Sequence
  Description of Artificial Sequence: Synthetic peptide
PFDP

SEQ ID NO: 4628 - protein, 4 aa, Artificial Sequence
  Description of Artificial Sequence: Synthetic peptide
KFDP

SEQ ID NO: 4629 - protein, 4 aa, Artificial Sequence
  Description of Artificial Sequence: Synthetic peptide
MFDP

SEQ ID NO: 4630 - protein, 4 aa, Artificial Sequence
  Description of Artificial Sequence: Synthetic peptide
TFDP

SEQ ID NO: 4631 - protein, 4 aa, Artificial Sequence
  Description of Artificial Sequence: Synthetic peptide
EFDP

SEQ ID NO: 4632 - protein, 4 aa, Artificial Sequence
  Description of Artificial Sequence: Synthetic peptide
VFDP

SEQ ID NO: 4633 - protein, 4 aa, Artificial Sequence
  Description of Artificial Sequence: Synthetic peptide
AFDP

SEQ ID NO: 4634 - protein, 6 aa, Artificial Sequence
  Description of Artificial Sequence: Synthetic peptide
NNWFDP

SEQ ID NO: 4635 - protein, 10 aa, Artificial Sequence
  Description of Artificial Sequence: Synthetic peptide
DYYYYYGMDV

SEQ ID NO: 4636 - protein, 9 aa, Artificial Sequence
  Description of Artificial Sequence: Synthetic peptide
YYYYYGMDV

SEQ ID NO: 4637 - protein, 8 aa, Artificial Sequence
  Description of Artificial Sequence: Synthetic peptide
YYYYGMDV

SEQ ID NO: 4638 - protein, 7 aa, Artificial Sequence
  Description of Artificial Sequence: Synthetic peptide
YYYGMDV

SEQ ID NO: 4639 - protein, 6 aa, Artificial Sequence
  Description of Artificial Sequence: Synthetic peptide
YYGMDV

SEQ ID NO: 4640 - protein, 5 aa, Artificial Sequence
  Description of Artificial Sequence: Synthetic peptide
YGMDV

SEQ ID NO: 4641 - protein, 4 aa, Artificial Sequence
  Description of Artificial Sequence: Synthetic peptide
GMDV

SEQ ID NO: 4642 - protein, 10 aa, Artificial Sequence
  Description of Artificial Sequence: Synthetic peptide
YYYYYYGMDV

SEQ ID NO: 4643 - protein, 10 aa, Artificial Sequence
  Description of Artificial Sequence: Synthetic peptide
HYYYYYGMDV

SEQ ID NO: 4644 - protein, 10 aa, Artificial Sequence
  Description of Artificial Sequence: Synthetic peptide
FYYYYYGMDV

SEQ ID NO: 4645 - protein, 10 aa, Artificial Sequence
  Description of Artificial Sequence: Synthetic peptide
SYYYYYGMDV

SEQ ID NO: 4646 - protein, 10 aa, Artificial Sequence
  Description of Artificial Sequence: Synthetic peptide
RYYYYYGMDV

SEQ ID NO: 4647 - protein, 10 aa, Artificial Sequence
  Description of Artificial Sequence: Synthetic peptide
LYYYYYGMDV

SEQ ID NO: 4648 - protein, 10 aa, Artificial Sequence
  Description of Artificial Sequence: Synthetic peptide
PYYYYYGMDV

SEQ ID NO: 4649 - protein, 10 aa, Artificial Sequence
  Description of Artificial Sequence: Synthetic peptide
IYYYYYGMDV

SEQ ID NO: 4650 - protein, 10 aa, Artificial Sequence
  Description of Artificial Sequence: Synthetic peptide
TYYYYYGMDV

SEQ ID NO: 4651 - protein, 10 aa, Artificial Sequence
  Description of Artificial Sequence: Synthetic peptide
GYYYYYGMDV

SEQ ID NO: 4652 - protein, 10 aa, Artificial Sequence
  Description of Artificial Sequence: Synthetic peptide
VYYYYYGMDV

SEQ ID NO: 4653 - protein, 10 aa, Artificial Sequence
  Description of Artificial Sequence: Synthetic peptide
AYYYYYGMDV

SEQ ID NO: 4654 - protein, 9 aa, Artificial Sequence
  Description of Artificial Sequence: Synthetic peptide
NYYYYGMDV

SEQ ID NO: 4655 - protein, 9 aa, Artificial Sequence
  Description of Artificial Sequence: Synthetic peptide
DYYYYGMDV

SEQ ID NO: 4656 - protein, 9 aa, Artificial Sequence
  Description of Artificial Sequence: Synthetic peptide
HYYYYGMDV

SEQ ID NO: 4657 - protein, 9 aa, Artificial Sequence
  Description of Artificial Sequence: Synthetic peptide
FYYYYGMDV

SEQ ID NO: 4658 - protein, 9 aa, Artificial Sequence
  Description of Artificial Sequence: Synthetic peptide
SYYYYGMDV

SEQ ID NO: 4659 - protein, 9 aa, Artificial Sequence
  Description of Artificial Sequence: Synthetic peptide
RYYYYGMDV

SEQ ID NO: 4660 - protein, 9 aa, Artificial Sequence
  Description of Artificial Sequence: Synthetic peptide
LYYYYGMDV

SEQ ID NO: 4661 - protein, 9 aa, Artificial Sequence
  Description of Artificial Sequence: Synthetic peptide
PYYYYGMDV

SEQ ID NO: 4662 - protein, 9 aa, Artificial Sequence
  Description of Artificial Sequence: Synthetic peptide
IYYYYGMDV

SEQ ID NO: 4663 - protein, 9 aa, Artificial Sequence
  Description of Artificial Sequence: Synthetic peptide
TYYYYGMDV

SEQ ID NO: 4664 - protein, 9 aa, Artificial Sequence
  Description of Artificial Sequence: Synthetic peptide
GYYYYGMDV

SEQ ID NO: 4665 - protein, 9 aa, Artificial Sequence
  Description of Artificial Sequence: Synthetic peptide
VYYYYGMDV

SEQ ID NO: 4666 - protein, 9 aa, Artificial Sequence
  Description of Artificial Sequence: Synthetic peptide
AYYYYGMDV

SEQ ID NO: 4667 - protein, 8 aa, Artificial Sequence
  Description of Artificial Sequence: Synthetic peptide
NYYYGMDV

SEQ ID NO: 4668 - protein, 8 aa, Artificial Sequence
  Description of Artificial Sequence: Synthetic peptide
DYYYGMDV

SEQ ID NO: 4669 - protein, 8 aa, Artificial Sequence
  Description of Artificial Sequence: Synthetic peptide
HYYYGMDV

SEQ ID NO: 4670 - protein, 8 aa, Artificial Sequence
  Description of Artificial Sequence: Synthetic peptide
FYYYGMDV

SEQ ID NO: 4671 - protein, 8 aa, Artificial Sequence
  Description of Artificial Sequence: Synthetic peptide
SYYYGMDV

SEQ ID NO: 4672 - protein, 8 aa, Artificial Sequence
  Description of Artificial Sequence: Synthetic peptide
RYYYGMDV

SEQ ID NO: 4673 - protein, 8 aa, Artificial Sequence
  Description of Artificial Sequence: Synthetic peptide
LYYYGMDV

SEQ ID NO: 4674 - protein, 8 aa, Artificial Sequence
  Description of Artificial Sequence: Synthetic peptide
PYYYGMDV

SEQ ID NO: 4675 - protein, 8 aa, Artificial Sequence
  Description of Artificial Sequence: Synthetic peptide
IYYYGMDV

SEQ ID NO: 4676 - protein, 8 aa, Artificial Sequence
  Description of Artificial Sequence: Synthetic peptide
TYYYGMDV

SEQ ID NO: 4677 - protein, 8 aa, Artificial Sequence
  Description of Artificial Sequence: Synthetic peptide
GYYYGMDV

SEQ ID NO: 4678 - protein, 8 aa, Artificial Sequence
  Description of Artificial Sequence: Synthetic peptide
VYYYGMDV

SEQ ID NO: 4679 - protein, 8 aa, Artificial Sequence
  Description of Artificial Sequence: Synthetic peptide
AYYYGMDV

SEQ ID NO: 4680 - protein, 10 aa, Artificial Sequence
  Description of Artificial Sequence: Synthetic peptide
NYYYYYGMDV

SEQ ID NO: 4681 - protein, 10 aa, Artificial Sequence
  Description of Artificial Sequence: Synthetic peptide
DYYYYYYMDV

SEQ ID NO: 4682 - protein, 9 aa, Artificial Sequence
  Description of Artificial Sequence: Synthetic peptide
YYYYYYMDV

SEQ ID NO: 4683 - protein, 8 aa, Artificial Sequence
  Description of Artificial Sequence: Synthetic peptide
YYYYYMDV

SEQ ID NO: 4684 - protein, 7 aa, Artificial Sequence
  Description of Artificial Sequence: Synthetic peptide
YYYYMDV

SEQ ID NO: 4685 - protein, 6 aa, Artificial Sequence
  Description of Artificial Sequence: Synthetic peptide
YYYMDV

SEQ ID NO: 4686 - protein, 5 aa, Artificial Sequence
  Description of Artificial Sequence: Synthetic peptide
YYMDV

SEQ ID NO: 4687 - protein, 4 aa, Artificial Sequence
  Description of Artificial Sequence: Synthetic peptide
YMDV

SEQ ID NO: 4688 - protein, 10 aa, Artificial Sequence
  Description of Artificial Sequence: Synthetic peptide
YYYYYYYMDV

SEQ ID NO: 4689 - protein, 10 aa, Artificial Sequence
  Description of Artificial Sequence: Synthetic peptide
HYYYYYYMDV

SEQ ID NO: 4690 - protein, 10 aa, Artificial Sequence
  Description of Artificial Sequence: Synthetic peptide
FYYYYYYMDV

SEQ ID NO: 4691 - protein, 10 aa, Artificial Sequence
  Description of Artificial Sequence: Synthetic peptide
SYYYYYYMDV

SEQ ID NO: 4692 - protein, 10 aa, Artificial Sequence
  Description of Artificial Sequence: Synthetic peptide
RYYYYYYMDV

SEQ ID NO: 4693 - protein, 10 aa, Artificial Sequence
  Description of Artificial Sequence: Synthetic peptide
LYYYYYYMDV

SEQ ID NO: 4694 - protein, 10 aa, Artificial Sequence
  Description of Artificial Sequence: Synthetic peptide
PYYYYYYMDV

SEQ ID NO: 4695 - protein, 10 aa, Artificial Sequence
  Description of Artificial Sequence: Synthetic peptide
IYYYYYYMDV

SEQ ID NO: 4696 - protein, 10 aa, Artificial Sequence
  Description of Artificial Sequence: Synthetic peptide
TYYYYYYMDV

SEQ ID NO: 4697 - protein, 10 aa, Artificial Sequence
  Description of Artificial Sequence: Synthetic peptide
GYYYYYYMDV

SEQ ID NO: 4698 - protein, 10 aa, Artificial Sequence
  Description of Artificial Sequence: Synthetic peptide
VYYYYYYMDV

SEQ ID NO: 4699 - protein, 10 aa, Artificial Sequence
  Description of Artificial Sequence: Synthetic peptide
AYYYYYYMDV

SEQ ID NO: 4700 - protein, 9 aa, Artificial Sequence
  Description of Artificial Sequence: Synthetic peptide
NYYYYYMDV

SEQ ID NO: 4701 - protein, 9 aa, Artificial Sequence
  Description of Artificial Sequence: Synthetic peptide
DYYYYYMDV

SEQ ID NO: 4702 - protein, 9 aa, Artificial Sequence
  Description of Artificial Sequence: Synthetic peptide
HYYYYYMDV

SEQ ID NO: 4703 - protein, 9 aa, Artificial Sequence
  Description of Artificial Sequence: Synthetic peptide
FYYYYYMDV

SEQ ID NO: 4704 - protein, 9 aa, Artificial Sequence
  Description of Artificial Sequence: Synthetic peptide
SYYYYYMDV

SEQ ID NO: 4705 - protein, 9 aa, Artificial Sequence
  Description of Artificial Sequence: Synthetic peptide
RYYYYYMDV

SEQ ID NO: 4706 - protein, 9 aa, Artificial Sequence
  Description of Artificial Sequence: Synthetic peptide
LYYYYYMDV

SEQ ID NO: 4707 - protein, 9 aa, Artificial Sequence
  Description of Artificial Sequence: Synthetic peptide
PYYYYYMDV

SEQ ID NO: 4708 - protein, 9 aa, Artificial Sequence
  Description of Artificial Sequence: Synthetic peptide
IYYYYYMDV

SEQ ID NO: 4709 - protein, 9 aa, Artificial Sequence
  Description of Artificial Sequence: Synthetic peptide
TYYYYYMDV

SEQ ID NO: 4710 - protein, 9 aa, Artificial Sequence
  Description of Artificial Sequence: Synthetic peptide
GYYYYYMDV

SEQ ID NO: 4711 - protein, 9 aa, Artificial Sequence
  Description of Artificial Sequence: Synthetic peptide
VYYYYYMDV

SEQ ID NO: 4712 - protein, 9 aa, Artificial Sequence
  Description of Artificial Sequence: Synthetic peptide
AYYYYYMDV

SEQ ID NO: 4713 - protein, 8 aa, Artificial Sequence
  Description of Artificial Sequence: Synthetic peptide
NYYYYMDV

SEQ ID NO: 4714 - protein, 8 aa, Artificial Sequence
  Description of Artificial Sequence: Synthetic peptide
DYYYYMDV

SEQ ID NO: 4715 - protein, 8 aa, Artificial Sequence
  Description of Artificial Sequence: Synthetic peptide
HYYYYMDV

SEQ ID NO: 4716 - protein, 8 aa, Artificial Sequence
  Description of Artificial Sequence: Synthetic peptide
FYYYYMDV

SEQ ID NO: 4717 - protein, 8 aa, Artificial Sequence
  Description of Artificial Sequence: Synthetic peptide
SYYYYMDV

SEQ ID NO: 4718 - protein, 8 aa, Artificial Sequence
  Description of Artificial Sequence: Synthetic peptide
RYYYYMDV

SEQ ID NO: 4719 - protein, 8 aa, Artificial Sequence
  Description of Artificial Sequence: Synthetic peptide
LYYYYMDV

SEQ ID NO: 4720 - protein, 8 aa, Artificial Sequence
  Description of Artificial Sequence: Synthetic peptide
PYYYYMDV

SEQ ID NO: 4721 - protein, 8 aa, Artificial Sequence
  Description of Artificial Sequence: Synthetic peptide
IYYYYMDV

SEQ ID NO: 4722 - protein, 8 aa, Artificial Sequence
  Description of Artificial Sequence: Synthetic peptide
TYYYYMDV

SEQ ID NO: 4723 - protein, 8 aa, Artificial Sequence
  Description of Artificial Sequence: Synthetic peptide
GYYYYMDV

SEQ ID NO: 4724 - protein, 8 aa, Artificial Sequence
  Description of Artificial Sequence: Synthetic peptide
VYYYYMDV

SEQ ID NO: 4725 - protein, 8 aa, Artificial Sequence
  Description of Artificial Sequence: Synthetic peptide
AYYYYMDV

SEQ ID NO: 4726 - protein, 10 aa, Artificial Sequence
  Description of Artificial Sequence: Synthetic peptide
NYYYYYYMDV

SEQ ID NO: 4727 - DNA, 52 bp, Homo sapiens
gctgaatacttccagcactggggccagggcaccctggtcaccgtctcctcag

SEQ ID NO: 4728 - DNA, 53 bp, Homo sapiens
ctactggtacttcgatctctggggccgtggcaccctggtcactgtctcctcag

SEQ ID NO: 4729 - DNA, 48 bp, Homo sapiens
atgcttttgatgtctggggccaagggacaatggtcaccgtctcttcag

SEQ ID NO: 4730 - DNA, 48 bp, Homo sapiens
atgcttttgatatctggggccaagggacaatggtcaccgtctcttcag

SEQ ID NO: 4731 - DNA, 48 bp, Homo sapiens
actactttgactactggggccaaggaaccctggtcaccgtctcctcag

SEQ ID NO: 4732 - DNA, 48 bp, Homo sapiens
actactttgactactggggccagggaaccctggtcaccgtctcctcag

SEQ ID NO: 4733 - DNA, 48 bp, Homo sapiens
gctactttgactactggggccaagggaccctggtcaccgtctcctcag

SEQ ID NO: 4734 - DNA, 51 bp, Homo sapiens
acaactggttcgactcctggggccaaggaaccctggtcaccgtctcctcag

SEQ ID NO: 4735 - DNA, 51 bp, Homo sapiens
acaactggttcgacccctggggccagggaaccctggtcaccgtctcctcag

SEQ ID NO: 4736 - DNA, 63 bp, Homo sapiens
attactactactactacggtatggacgtctgggggcaagggaccacggtcaccgtctcctcag

SEQ ID NO: 4737 - DNA, 63 bp, Homo sapiens
attactactactactacggtatggacgtctggggccaagggaccacggtcaccgtctcctcag

SEQ ID NO: 4738 - DNA, 63 bp, Homo sapiens
attactactactactactacatggacgtctggggcaaagggaccacggtcaccgtctcctcag

SEQ ID NO: 4739 - DNA, 17 bp, Homo sapiens
ggtacaactggaacgac

SEQ ID NO: 4740 - DNA, 17 bp, Homo sapiens
ggtataactggaacgac

SEQ ID NO: 4741 - DNA, 20 bp, Homo sapiens
ggtatagtgggagctactac

SEQ ID NO: 4742 - DNA, 17 bp, Homo sapiens
ggtataactggaactac

SEQ ID NO: 4743 - DNA, 31 bp, Homo sapiens
aggatattgtagtggtggtagctgctactcc

SEQ ID NO: 4744 - DNA, 31 bp, Homo sapiens
aggatattgtagtagtaccagctgctatgcc

SEQ ID NO: 4745 - DNA, 31 bp, Homo sapiens
aggatattgtagtagtaccagctgctatacc

SEQ ID NO: 4746 - DNA, 31 bp, Homo sapiens
tggatattgtagtagtaccagctgctatgcc

SEQ ID NO: 4747 - DNA, 28 bp, Homo sapiens
agcatattgtggtggtgattgctattcc

SEQ ID NO: 4748 - DNA, 28 bp, Homo sapiens
agcatattgtggtggtgactgctattcc

SEQ ID NO: 4749 - DNA, 31 bp, Homo sapiens
aggatattgtactaatggtgtatgctatacc

SEQ ID NO: 4750 - DNA, 31 bp, Homo sapiens
gtattactatggttcggggagttattataac

SEQ ID NO: 4751 - DNA, 31 bp, Homo sapiens
gtattactatggttcagggagttattataac

SEQ ID NO: 4752 - DNA, 37 bp, Homo sapiens
gtattatgattacgtttgggggagttatgcttatacc

SEQ ID NO: 4753 - DNA, 31 bp, Homo sapiens
gtattactatgatagtagtggttattactac

SEQ ID NO: 4754 - DNA, 31 bp, Homo sapiens
gtattacgatttttggagtggttattatacc

SEQ ID NO: 4755 - DNA, 31 bp, Homo sapiens
gtattacgatattttgactggttattataac

SEQ ID NO: 4756 - DNA, 16 bp, Homo sapiens
tgactacggtgactac

SEQ ID NO: 4757 - DNA, 19 bp, Homo sapiens
tgactacggtggtaactcc

SEQ ID NO: 4758 - DNA, 16 bp, Homo sapiens
tgactacagtaactac

SEQ ID NO: 4759 - DNA, 23 bp, Homo sapiens
gtggatatagtggctacgattac

SEQ ID NO: 4760 - DNA, 20 bp, Homo sapiens
gtagagatggctacaattac

SEQ ID NO: 4761 - DNA, 20 bp, Homo sapiens
gtggatacagctatggttac

SEQ ID NO: 4762 - DNA, 21 bp, Homo sapiens
gggtatagcagcagctggtac

SEQ ID NO: 4763 - DNA, 21 bp, Homo sapiens
gggtatagcagtggctggtac

SEQ ID NO: 4764 - DNA, 18 bp, Homo sapiens
gagtatagcagctcgtcc

SEQ ID NO: 4765 - DNA, 11 bp, Homo sapiens
ctaactgggga

SEQ ID NO: 4766-4770 - skipped (5 entries)

SEQ ID NO: 4771 - protein, 4 aa, Artificial Sequence
  Description of Artificial Sequence: Synthetic peptide
QQLV

SEQ ID NO: 4772 - protein, 4 aa, Artificial Sequence
  Description of Artificial Sequence: Synthetic peptide
QWLV

SEQ ID NO: 4773 - protein, 4 aa, Artificial Sequence
  Description of Artificial Sequence: Synthetic peptide
WELL

SEQ ID NO: 4774 - skipped

SEQ ID NO: 4775 - protein, 5 aa, Artificial Sequence
  Description of Artificial Sequence: Synthetic peptide
RWLQL

SEQ ID NO: 4776 - protein, 4 aa, Artificial Sequence
  Description of Artificial Sequence: Synthetic peptide
WLRL

SEQ ID NO: 4777 - protein, 5 aa, Artificial Sequence
  Description of Artificial Sequence: Synthetic peptide
SILWW

SEQ ID NO: 4778 - protein, 4 aa, Artificial Sequence
  Description of Artificial Sequence: Synthetic peptide
ITIF

SEQ ID NO: 4779 - protein, 4 aa, Artificial Sequence
  Description of Artificial Sequence: Synthetic peptide
RILY

SEQ ID NO: 4780 - skipped

SEQ ID NO: 4781 - protein, 5 aa, Artificial Sequence
  Description of Artificial Sequence: Synthetic peptide
YQLLC

SEQ ID NO: 4782 - protein, 5 aa, Artificial Sequence
  Description of Artificial Sequence: Synthetic peptide
YQLLY

SEQ ID NO: 4783 - protein, 9 aa, Artificial Sequence
  Description of Artificial Sequence: Synthetic peptide
VLLWFGELL

SEQ ID NO: 4784 - protein, 9 aa, Artificial Sequence
  Description of Artificial Sequence: Synthetic peptide
VLLWFRELL

SEQ ID NO: 4785 - protein, 4 aa, Artificial Sequence
  Description of Artificial Sequence: Synthetic peptide
WLLL

SEQ ID NO: 4786 - protein, 9 aa, Artificial Sequence
  Description of Artificial Sequence: Synthetic peptide
VLRYFDWLL

SEQ ID NO: 4787 - protein, 5 aa, Artificial Sequence
  Description of Artificial Sequence: Synthetic peptide
YQLLC

SEQ ID NO: 4788 - protein, 9 aa, Artificial Sequence
  Description of Artificial Sequence: Synthetic peptide
LRLGELCLY

SEQ ID NO: 4789 - protein, 4 aa, Artificial Sequence
  Description of Artificial Sequence: Synthetic peptide
GRRG

SEQ ID NO: 4790 - protein, 4 aa, Artificial Sequence
  Description of Artificial Sequence: Synthetic peptide
DQGG

SEQ ID NO: 4791 - protein, 4 aa, Artificial Sequence
  Description of Artificial Sequence: Synthetic peptide
AREG

SEQ ID NO: 4792 - protein, 4 aa, Artificial Sequence
  Description of Artificial Sequence: Synthetic peptide
ARDG

SEQ ID NO: 4793 - protein, 4 aa, Artificial Sequence
  Description of Artificial Sequence: Synthetic peptide
ARGG

SEQ ID NO: 4794 - protein, 4 aa, Artificial Sequence
  Description of Artificial Sequence: Synthetic peptide
ARER

SEQ ID NO: 4795 - protein, 4 aa, Artificial Sequence
  Description of Artificial Sequence: Synthetic peptide
ARDR

SEQ ID NO: 4796 - protein, 4 aa, Artificial Sequence
  Description of Artificial Sequence: Synthetic peptide
ARGR

SEQ ID NO: 4797 - protein, 4 aa, Artificial Sequence
  Description of Artificial Sequence: Synthetic peptide
ARES

SEQ ID NO: 4798 - protein, 4 aa, Artificial Sequence
  Description of Artificial Sequence: Synthetic peptide
ARDS

SEQ ID NO: 4799 - protein, 4 aa, Artificial Sequence
  Description of Artificial Sequence: Synthetic peptide
ARGS

SEQ ID NO: 4800 - protein, 4 aa, Artificial Sequence
  Description of Artificial Sequence: Synthetic peptide
ARDP

SEQ ID NO: 4801 - protein, 4 aa, Artificial Sequence
  Description of Artificial Sequence: Synthetic peptide
ARGP

SEQ ID NO: 4802 - protein, 4 aa, Artificial Sequence
  Description of Artificial Sequence: Synthetic peptide
ARDL

SEQ ID NO: 4803 - protein, 4 aa, Artificial Sequence
  Description of Artificial Sequence: Synthetic peptide
ARGL

SEQ ID NO: 4804 - protein, 4 aa, Artificial Sequence
  Description of Artificial Sequence: Synthetic peptide
AREA

SEQ ID NO: 4805 - protein, 4 aa, Artificial Sequence
  Description of Artificial Sequence: Synthetic peptide
ARDA

SEQ ID NO: 4806 - protein, 4 aa, Artificial Sequence
  Description of Artificial Sequence: Synthetic peptide
ARGA

SEQ ID NO: 4807 - protein, 4 aa, Artificial Sequence
  Description of Artificial Sequence: Synthetic peptide
ARET

SEQ ID NO: 4808 - protein, 4 aa, Artificial Sequence
  Description of Artificial Sequence: Synthetic peptide
ARDT

SEQ ID NO: 4809 - protein, 4 aa, Artificial Sequence
  Description of Artificial Sequence: Synthetic peptide
ARGT

SEQ ID NO: 4810 - protein, 4 aa, Artificial Sequence
  Description of Artificial Sequence: Synthetic peptide
AREV

SEQ ID NO: 4811 - protein, 4 aa, Artificial Sequence
  Description of Artificial Sequence: Synthetic peptide
ARDV

SEQ ID NO: 4812 - protein, 4 aa, Artificial Sequence
  Description of Artificial Sequence: Synthetic peptide
ARGV

SEQ ID NO: 4813 - protein, 5 aa, Artificial Sequence
  Description of Artificial Sequence: Synthetic peptide
AREGG

SEQ ID NO: 4814 - protein, 5 aa, Artificial Sequence
  Description of Artificial Sequence: Synthetic peptide
ARDGG

SEQ ID NO: 4815 - protein, 5 aa, Artificial Sequence
  Description of Artificial Sequence: Synthetic peptide
ARGGG

SEQ ID NO: 4816 - protein, 5 aa, Artificial Sequence
  Description of Artificial Sequence: Synthetic peptide
ARDGR

SEQ ID NO: 4817 - protein, 5 aa, Artificial Sequence
  Description of Artificial Sequence: Synthetic peptide
ARGGS

SEQ ID NO: 4818 - protein, 5 aa, Artificial Sequence
  Description of Artificial Sequence: Synthetic peptide
ARGGP

SEQ ID NO: 4819 - protein, 5 aa, Artificial Sequence
  Description of Artificial Sequence: Synthetic peptide
ARGGA

SEQ ID NO: 4820 - protein, 5 aa, Artificial Sequence
  Description of Artificial Sequence: Synthetic peptide
ARDGT

SEQ ID NO: 4821 - protein, 5 aa, Artificial Sequence
  Description of Artificial Sequence: Synthetic peptide
ARGGT

SEQ ID NO: 4822 - protein, 5 aa, Artificial Sequence
  Description of Artificial Sequence: Synthetic peptide
AREGV

SEQ ID NO: 4823 - protein, 5 aa, Artificial Sequence
  Description of Artificial Sequence: Synthetic peptide
ARGGV

SEQ ID NO: 4824 - protein, 4 aa, Artificial Sequence
  Description of Artificial Sequence: Synthetic peptide
ARRG

SEQ ID NO: 4825 - protein, 5 aa, Artificial Sequence
  Description of Artificial Sequence: Synthetic peptide
ARERG

SEQ ID NO: 4826 - protein, 5 aa, Artificial Sequence
  Description of Artificial Sequence: Synthetic peptide
ARDRG

SEQ ID NO: 4827 - protein, 5 aa, Artificial Sequence
  Description of Artificial Sequence: Synthetic peptide
ARGRG

SEQ ID NO: 4828 - protein, 4 aa, Artificial Sequence
  Description of Artificial Sequence: Synthetic peptide
ARSG

SEQ ID NO: 4829 - protein, 5 aa, Artificial Sequence
  Description of Artificial Sequence: Synthetic peptide
ARDSG

SEQ ID NO: 4830 - protein, 5 aa, Artificial Sequence
  Description of Artificial Sequence: Synthetic peptide
ARDPG

SEQ ID NO: 4831 - protein, 4 aa, Artificial Sequence
  Description of Artificial Sequence: Synthetic peptide
ARLG

SEQ ID NO: 4832 - protein, 5 aa, Artificial Sequence
  Description of Artificial Sequence: Synthetic peptide
ARDLG

SEQ ID NO: 4833 - protein, 4 aa, Artificial Sequence
  Description of Artificial Sequence: Synthetic peptide
ARAG

SEQ ID NO: 4834 - protein, 4 aa, Artificial Sequence
  Description of Artificial Sequence: Synthetic peptide
ARVG

SEQ ID NO: 4835 - protein, 5 aa, Artificial Sequence
  Description of Artificial Sequence: Synthetic peptide
ARGVG

SEQ ID NO: 4836 - protein, 4 aa, Artificial Sequence
  Description of Artificial Sequence: Synthetic peptide
ARPR

SEQ ID NO: 4837 - protein, 5 aa, Artificial Sequence
  Description of Artificial Sequence: Synthetic peptide
ARGPR

SEQ ID NO: 4838 - protein, 4 aa, Artificial Sequence
  Description of Artificial Sequence: Synthetic peptide
ARPS

SEQ ID NO: 4839 - protein, 5 aa, Artificial Sequence
  Description of Artificial Sequence: Synthetic peptide
ARDPS

SEQ ID NO: 4840 - protein, 5 aa, Artificial Sequence
  Description of Artificial Sequence: Synthetic peptide
ARGPS

SEQ ID NO: 4841 - protein, 5 aa, Artificial Sequence
  Description of Artificial Sequence: Synthetic peptide
ARDPP

SEQ ID NO: 4842 - protein, 5 aa, Artificial Sequence
  Description of Artificial Sequence: Synthetic peptide
ARGPP

SEQ ID NO: 4843 - protein, 4 aa, Artificial Sequence
  Description of Artificial Sequence: Synthetic peptide
ARPL

SEQ ID NO: 4844 - protein, 5 aa, Artificial Sequence
  Description of Artificial Sequence: Synthetic peptide
ARDPL

SEQ ID NO: 4845 - protein, 4 aa, Artificial Sequence
  Description of Artificial Sequence: Synthetic peptide
ARRP

SEQ ID NO: 4846 - protein, 5 aa, Artificial Sequence
  Description of Artificial Sequence: Synthetic peptide
ARDRP

SEQ ID NO: 4847 - protein, 4 aa, Artificial Sequence
  Description of Artificial Sequence: Synthetic peptide
ARSP

SEQ ID NO: 4848 - protein, 4 aa, Artificial Sequence
  Description of Artificial Sequence: Synthetic peptide
ARLP

SEQ ID NO: 4849 - protein, 4 aa, Artificial Sequence
  Description of Artificial Sequence: Synthetic peptide
ARAP

SEQ ID NO: 4850 - protein, 4 aa, Artificial Sequence
  Description of Artificial Sequence: Synthetic peptide
ARTP

SEQ ID NO: 4851 - protein, 4 aa, Artificial Sequence
  Description of Artificial Sequence: Synthetic peptide
ARVP

SEQ ID NO: 4852 - protein, 5 aa, Artificial Sequence
  Description of Artificial Sequence: Synthetic peptide
ARVGG

SEQ ID NO: 4853 - protein, 4 aa, Artificial Sequence
  Description of Artificial Sequence: Synthetic peptide
ARDQ

SEQ ID NO: 4854 - protein, 4 aa, Artificial Sequence
  Description of Artificial Sequence: Synthetic peptide
ARDH

SEQ ID NO: 4855 - protein, 4 aa, Artificial Sequence
  Description of Artificial Sequence: Synthetic peptide
ARAR

SEQ ID NO: 4856 - protein, 4 aa, Artificial Sequence
  Description of Artificial Sequence: Synthetic peptide
ARAS

SEQ ID NO: 4857 - protein, 5 aa, Artificial Sequence
  Description of Artificial Sequence: Synthetic peptide
ARDQG

SEQ ID NO: 4858 - protein, 4 aa, Artificial Sequence
  Description of Artificial Sequence: Synthetic peptide
ARSR

SEQ ID NO: 4859 - protein, 5 aa, Artificial Sequence
  Description of Artificial Sequence: Synthetic peptide
ARDRS

SEQ ID NO: 4860 - protein, 4 aa, Artificial Sequence
  Description of Artificial Sequence: Synthetic peptide
ARSL

SEQ ID NO: 4861 - protein, 4 aa, Artificial Sequence
  Description of Artificial Sequence: Synthetic peptide
ARLH

SEQ ID NO: 4862 - protein, 5 aa, Artificial Sequence
  Description of Artificial Sequence: Synthetic peptide
ARDLT

SEQ ID NO: 4863 - protein, 4 aa, Artificial Sequence
  Description of Artificial Sequence: Synthetic peptide
ARAE

SEQ ID NO: 4864 - protein, 5 aa, Artificial Sequence
  Description of Artificial Sequence: Synthetic peptide
ARDLS

SEQ ID NO: 4865 - protein, 4 aa, Artificial Sequence
  Description of Artificial Sequence: Synthetic peptide
ARGD

SEQ ID NO: 4866 - protein, 4 aa, Artificial Sequence
  Description of Artificial Sequence: Synthetic peptide
ARRR

SEQ ID NO: 4867 - protein, 4 aa, Artificial Sequence
  Description of Artificial Sequence: Synthetic peptide
ARDK

SEQ ID NO: 4868 - protein, 4 aa, Artificial Sequence
  Description of Artificial Sequence: Synthetic peptide
ARVS

SEQ ID NO: 4869 - protein, 5 aa, Artificial Sequence
  Description of Artificial Sequence: Synthetic peptide
ARDRL

SEQ ID NO: 4870 - protein, 4 aa, Artificial Sequence
  Description of Artificial Sequence: Synthetic peptide
ARGQ

SEQ ID NO: 4871 - protein, 4 aa, Artificial Sequence
  Description of Artificial Sequence: Synthetic peptide
ARVR

SEQ ID NO: 4872 - protein, 4 aa, Artificial Sequence
  Description of Artificial Sequence: Synthetic peptide
ARAK

SEQ ID NO: 4873 - protein, 4 aa, Artificial Sequence
  Description of Artificial Sequence: Synthetic peptide
ARGK

SEQ ID NO: 4874 - protein, 5 aa, Artificial Sequence
  Description of Artificial Sequence: Synthetic peptide
ARDIS

SEQ ID NO: 4875 - protein, 5 aa, Artificial Sequence
  Description of Artificial Sequence: Synthetic peptide
ARDFT

SEQ ID NO: 4876 - protein, 4 aa, Artificial Sequence
  Description of Artificial Sequence: Synthetic peptide
ARQG

SEQ ID NO: 4877 - protein, 4 aa, Artificial Sequence
  Description of Artificial Sequence: Synthetic peptide
AKEG

SEQ ID NO: 4878 - protein, 4 aa, Artificial Sequence
  Description of Artificial Sequence: Synthetic peptide
AKDG

SEQ ID NO: 4879 - protein, 4 aa, Artificial Sequence
  Description of Artificial Sequence: Synthetic peptide
AKGG

SEQ ID NO: 4880 - protein, 4 aa, Artificial Sequence
  Description of Artificial Sequence: Synthetic peptide
AKER

SEQ ID NO: 4881 - protein, 4 aa, Artificial Sequence
  Description of Artificial Sequence: Synthetic peptide
AKDR

SEQ ID NO: 4882 - protein, 4 aa, Artificial Sequence
  Description of Artificial Sequence: Synthetic peptide
AKGR

SEQ ID NO: 4883 - protein, 4 aa, Artificial Sequence
  Description of Artificial Sequence: Synthetic peptide
AKES

SEQ ID NO: 4884 - protein, 4 aa, Artificial Sequence
  Description of Artificial Sequence: Synthetic peptide
AKDS

SEQ ID NO: 4885 - protein, 4 aa, Artificial Sequence
  Description of Artificial Sequence: Synthetic peptide
AKGS

SEQ ID NO: 4886 - protein, 4 aa, Artificial Sequence
  Description of Artificial Sequence: Synthetic peptide
AKDP

SEQ ID NO: 4887 - protein, 4 aa, Artificial Sequence
  Description of Artificial Sequence: Synthetic peptide
AKGP

SEQ ID NO: 4888 - protein, 4 aa, Artificial Sequence
  Description of Artificial Sequence: Synthetic peptide
AKDL

SEQ ID NO: 4889 - protein, 4 aa, Artificial Sequence
  Description of Artificial Sequence: Synthetic peptide
AKGL

SEQ ID NO: 4890 - protein, 4 aa, Artificial Sequence
  Description of Artificial Sequence: Synthetic peptide
AKEA

SEQ ID NO: 4891 - protein, 4 aa, Artificial Sequence
  Description of Artificial Sequence: Synthetic peptide
AKDA

SEQ ID NO: 4892 - protein, 4 aa, Artificial Sequence
  Description of Artificial Sequence: Synthetic peptide
AKGA

SEQ ID NO: 4893 - protein, 4 aa, Artificial Sequence
  Description of Artificial Sequence: Synthetic peptide
AKET

SEQ ID NO: 4894 - protein, 4 aa, Artificial Sequence
  Description of Artificial Sequence: Synthetic peptide
AKDT

SEQ ID NO: 4895 - protein, 4 aa, Artificial Sequence
  Description of Artificial Sequence: Synthetic peptide
AKGT

SEQ ID NO: 4896 - protein, 4 aa, Artificial Sequence
  Description of Artificial Sequence: Synthetic peptide
AKEV

SEQ ID NO: 4897 - protein, 4 aa, Artificial Sequence
  Description of Artificial Sequence: Synthetic peptide
AKDV

SEQ ID NO: 4898 - protein, 4 aa, Artificial Sequence
  Description of Artificial Sequence: Synthetic peptide
AKGV

SEQ ID NO: 4899 - protein, 5 aa, Artificial Sequence
  Description of Artificial Sequence: Synthetic peptide
AKEGG

SEQ ID NO: 4900 - protein, 5 aa, Artificial Sequence
  Description of Artificial Sequence: Synthetic peptide
AKDGG

SEQ ID NO: 4901 - protein, 5 aa, Artificial Sequence
  Description of Artificial Sequence: Synthetic peptide
AKGGG

SEQ ID NO: 4902 - protein, 5 aa, Artificial Sequence
  Description of Artificial Sequence: Synthetic peptide
AKDGR

SEQ ID NO: 4903 - protein, 5 aa, Artificial Sequence
  Description of Artificial Sequence: Synthetic peptide
AKGGS

SEQ ID NO: 4904 - protein, 5 aa, Artificial Sequence
  Description of Artificial Sequence: Synthetic peptide
AKGGP

SEQ ID NO: 4905 - protein, 5 aa, Artificial Sequence
  Description of Artificial Sequence: Synthetic peptide
AKGGA

SEQ ID NO: 4906 - protein, 5 aa, Artificial Sequence
  Description of Artificial Sequence: Synthetic peptide
AKDGT

SEQ ID NO: 4907 - protein, 5 aa, Artificial Sequence
  Description of Artificial Sequence: Synthetic peptide
AKGGT

SEQ ID NO: 4908 - protein, 5 aa, Artificial Sequence
  Description of Artificial Sequence: Synthetic peptide
AKEGV

SEQ ID NO: 4909 - protein, 5 aa, Artificial Sequence
  Description of Artificial Sequence: Synthetic peptide
AKGGV

SEQ ID NO: 4910 - protein, 4 aa, Artificial Sequence
  Description of Artificial Sequence: Synthetic peptide
AKRG

SEQ ID NO: 4911 - protein, 5 aa, Artificial Sequence
  Description of Artificial Sequence: Synthetic peptide
AKERG

SEQ ID NO: 4912 - protein, 5 aa, Artificial Sequence
  Description of Artificial Sequence: Synthetic peptide
AKDRG

SEQ ID NO: 4913 - protein, 5 aa, Artificial Sequence
  Description of Artificial Sequence: Synthetic peptide
AKGRG

SEQ ID NO: 4914 - protein, 4 aa, Artificial Sequence
  Description of Artificial Sequence: Synthetic peptide
AKSG

SEQ ID NO: 4915 - protein, 5 aa, Artificial Sequence
  Description of Artificial Sequence: Synthetic peptide
AKDSG

SEQ ID NO: 4916 - protein, 5 aa, Artificial Sequence
  Description of Artificial Sequence: Synthetic peptide
AKDPG

SEQ ID NO: 4917 - protein, 4 aa, Artificial Sequence
  Description of Artificial Sequence: Synthetic peptide
AKLG

SEQ ID NO: 4918 - protein, 5 aa, Artificial Sequence
  Description of Artificial Sequence: Synthetic peptide
AKDLG

SEQ ID NO: 4919 - protein, 4 aa, Artificial Sequence
  Description of Artificial Sequence: Synthetic peptide
AKAG

SEQ ID NO: 4920 - protein, 4 aa, Artificial Sequence
  Description of Artificial Sequence: Synthetic peptide
AKVG

SEQ ID NO: 4921 - protein, 5 aa, Artificial Sequence
  Description of Artificial Sequence: Synthetic peptide
AKGVG

SEQ ID NO: 4922 - protein, 4 aa, Artificial Sequence
  Description of Artificial Sequence: Synthetic peptide
AKPR

SEQ ID NO: 4923 - protein, 5 aa, Artificial Sequence
  Description of Artificial Sequence: Synthetic peptide
AKGPR

SEQ ID NO: 4924 - protein, 4 aa, Artificial Sequence
  Description of Artificial Sequence: Synthetic peptide
AKPS

SEQ ID NO: 4925 - protein, 5 aa, Artificial Sequence
  Description of Artificial Sequence: Synthetic peptide
AKDPS

SEQ ID NO: 4926 - protein, 5 aa, Artificial Sequence
  Description of Artificial Sequence: Synthetic peptide
AKGPS

SEQ ID NO: 4927 - protein, 5 aa, Artificial Sequence
  Description of Artificial Sequence: Synthetic peptide
AKDPP

SEQ ID NO: 4928 - protein, 5 aa, Artificial Sequence
  Description of Artificial Sequence: Synthetic peptide
AKGPP

SEQ ID NO: 4929 - protein, 4 aa, Artificial Sequence
  Description of Artificial Sequence: Synthetic peptide
AKPL

SEQ ID NO: 4930 - protein, 5 aa, Artificial Sequence
  Description of Artificial Sequence: Synthetic peptide
AKDPL

SEQ ID NO: 4931 - protein, 4 aa, Artificial Sequence
  Description of Artificial Sequence: Synthetic peptide
AKRP

SEQ ID NO: 4932 - protein, 5 aa, Artificial Sequence
  Description of Artificial Sequence: Synthetic peptide
AKDRP

SEQ ID NO: 4933 - protein, 4 aa, Artificial Sequence
  Description of Artificial Sequence: Synthetic peptide
AKSP

SEQ ID NO: 4934 - protein, 4 aa, Artificial Sequence
  Description of Artificial Sequence: Synthetic peptide
AKLP

SEQ ID NO: 4935 - protein, 4 aa, Artificial Sequence
  Description of Artificial Sequence: Synthetic peptide
AKAP

SEQ ID NO: 4936 - protein, 4 aa, Artificial Sequence
  Description of Artificial Sequence: Synthetic peptide
AKTP

SEQ ID NO: 4937 - protein, 4 aa, Artificial Sequence
  Description of Artificial Sequence: Synthetic peptide
AKVP

SEQ ID NO: 4938 - protein, 5 aa, Artificial Sequence
  Description of Artificial Sequence: Synthetic peptide
AKVGG

SEQ ID NO: 4939 - protein, 4 aa, Artificial Sequence
  Description of Artificial Sequence: Synthetic peptide
AKDQ

SEQ ID NO: 4940 - protein, 4 aa, Artificial Sequence
  Description of Artificial Sequence: Synthetic peptide
AKDH

SEQ ID NO: 4941 - protein, 4 aa, Artificial Sequence
  Description of Artificial Sequence: Synthetic peptide
AKAR

SEQ ID NO: 4942 - protein, 4 aa, Artificial Sequence
  Description of Artificial Sequence: Synthetic peptide
AKAS

SEQ ID NO: 4943 - protein, 5 aa, Artificial Sequence
  Description of Artificial Sequence: Synthetic peptide
AKDQG

SEQ ID NO: 4944 - protein, 4 aa, Artificial Sequence
  Description of Artificial Sequence: Synthetic peptide
AKSR

SEQ ID NO: 4945 - protein, 5 aa, Artificial Sequence
  Description of Artificial Sequence: Synthetic peptide
AKDRS

SEQ ID NO: 4946 - protein, 4 aa, Artificial Sequence
  Description of Artificial Sequence: Synthetic peptide
AKSL

SEQ ID NO: 4947 - protein, 4 aa, Artificial Sequence
  Description of Artificial Sequence: Synthetic peptide
AKLH

SEQ ID NO: 4948 - protein, 5 aa, Artificial Sequence
  Description of Artificial Sequence: Synthetic peptide
AKDLT

SEQ ID NO: 4949 - protein, 4 aa, Artificial Sequence
  Description of Artificial Sequence: Synthetic peptide
AKAE

SEQ ID NO: 4950 - protein, 5 aa, Artificial Sequence
  Description of Artificial Sequence: Synthetic peptide
AKDLS

SEQ ID NO: 4951 - protein, 4 aa, Artificial Sequence
  Description of Artificial Sequence: Synthetic peptide
AKGD

SEQ ID NO: 4952 - protein, 4 aa, Artificial Sequence
  Description of Artificial Sequence: Synthetic peptide
AKRR

SEQ ID NO: 4953 - protein, 4 aa, Artificial Sequence
  Description of Artificial Sequence: Synthetic peptide
AKDK

SEQ ID NO: 4954 - protein, 4 aa, Artificial Sequence
  Description of Artificial Sequence: Synthetic peptide
AKVS

SEQ ID NO: 4955 - protein, 5 aa, Artificial Sequence
  Description of Artificial Sequence: Synthetic peptide
AKDRL

SEQ ID NO: 4956 - protein, 4 aa, Artificial Sequence
  Description of Artificial Sequence: Synthetic peptide
AKGQ

SEQ ID NO: 4957 - protein, 4 aa, Artificial Sequence
  Description of Artificial Sequence: Synthetic peptide
AKVR

SEQ ID NO: 4958 - protein, 4 aa, Artificial Sequence
  Description of Artificial Sequence: Synthetic peptide
AKAK

SEQ ID NO: 4959 - protein, 4 aa, Artificial Sequence
  Description of Artificial Sequence: Synthetic peptide
AKGK

SEQ ID NO: 4960 - protein, 5 aa, Artificial Sequence
  Description of Artificial Sequence: Synthetic peptide
AKDIS

SEQ ID NO: 4961 - protein, 5 aa, Artificial Sequence
  Description of Artificial Sequence: Synthetic peptide
AKDFT

SEQ ID NO: 4962 - protein, 4 aa, Artificial Sequence
  Description of Artificial Sequence: Synthetic peptide
AKQG

SEQ ID NO: 4963 - DNA, 12 bp, Artificial Sequence
  Description of Artificial Sequence: Synthetic oligonucleotide
gccagagaggga

SEQ ID NO: 4964 - DNA, 12 bp, Artificial Sequence
  Description of Artificial Sequence: Synthetic oligonucleotide
gccagagacgga

SEQ ID NO: 4965 - DNA, 12 bp, Artificial Sequence
  Description of Artificial Sequence: Synthetic oligonucleotide
gccagaggtgga

SEQ ID NO: 4966 - DNA, 12 bp, Artificial Sequence
  Description of Artificial Sequence: Synthetic oligonucleotide
gccagagagaga

SEQ ID NO: 4967 - DNA, 12 bp, Artificial Sequence
  Description of Artificial Sequence: Synthetic oligonucleotide
gccagagacaga

SEQ ID NO: 4968 - DNA, 12 bp, Artificial Sequence
  Description of Artificial Sequence: Synthetic oligonucleotide
gccagaggcaga

SEQ ID NO: 4969 - DNA, 12 bp, Artificial Sequence
  Description of Artificial Sequence: Synthetic oligonucleotide
gccagagaatct

SEQ ID NO: 4970 - DNA, 12 bp, Artificial Sequence
  Description of Artificial Sequence: Synthetic oligonucleotide
gccagagactct

SEQ ID NO: 4971 - DNA, 12 bp, Artificial Sequence
  Description of Artificial Sequence: Synthetic oligonucleotide
gccagaggttct

SEQ ID NO: 4972 - DNA, 12 bp, Artificial Sequence
  Description of Artificial Sequence: Synthetic oligonucleotide
gccagagaccct

SEQ ID NO: 4973 - DNA, 12 bp, Artificial Sequence
  Description of Artificial Sequence: Synthetic oligonucleotide
gccagagggcct

SEQ ID NO: 4974 - DNA, 12 bp, Artificial Sequence
  Description of Artificial Sequence: Synthetic oligonucleotide
gccagagacttg

SEQ ID NO: 4975 - DNA, 12 bp, Artificial Sequence
  Description of Artificial Sequence: Synthetic oligonucleotide
gccagagggttg

SEQ ID NO: 4976 - DNA, 12 bp, Artificial Sequence
  Description of Artificial Sequence: Synthetic oligonucleotide
gccagagaggct

SEQ ID NO: 4977 - DNA, 12 bp, Artificial Sequence
  Description of Artificial Sequence: Synthetic oligonucleotide
gccagagatgct

SEQ ID NO: 4978 - DNA, 12 bp, Artificial Sequence
  Description of Artificial Sequence: Synthetic oligonucleotide
gccagaggtgct

SEQ ID NO: 4979 - DNA, 12 bp, Artificial Sequence
  Description of Artificial Sequence: Synthetic oligonucleotide
gccagagagact

SEQ ID NO: 4980 - DNA, 12 bp, Artificial Sequence
  Description of Artificial Sequence: Synthetic oligonucleotide
gccagagatact

SEQ ID NO: 4981 - DNA, 12 bp, Artificial Sequence
  Description of Artificial Sequence: Synthetic oligonucleotide
gccagaggcact

SEQ ID NO: 4982 - DNA, 12 bp, Artificial Sequence
  Description of Artificial Sequence: Synthetic oligonucleotide
gccagagaggtg

SEQ ID NO: 4983 - DNA, 12 bp, Artificial Sequence
  Description of Artificial Sequence: Synthetic oligonucleotide
gccagagatgtg

SEQ ID NO: 4984 - DNA, 12 bp, Artificial Sequence
  Description of Artificial Sequence: Synthetic oligonucleotide
gccagaggggtg

SEQ ID NO: 4985 - DNA, 15 bp, Artificial Sequence
  Description of Artificial Sequence: Synthetic oligonucleotide
gccagagagggagga

SEQ ID NO: 4986 - DNA, 15 bp, Artificial Sequence
  Description of Artificial Sequence: Synthetic oligonucleotide
gccagagatggtgga

SEQ ID NO: 4987 - DNA, 15 bp, Artificial Sequence
  Description of Artificial Sequence: Synthetic oligonucleotide
gccagaggtggagga

SEQ ID NO: 4988 - DNA, 15 bp, Artificial Sequence
  Description of Artificial Sequence: Synthetic oligonucleotide
gccagagacggcaga

SEQ ID NO: 4989 - DNA, 15 bp, Artificial Sequence
  Description of Artificial Sequence: Synthetic oligonucleotide
gccagaggcggttct

SEQ ID NO: 4990 - DNA, 15 bp, Artificial Sequence
  Description of Artificial Sequence: Synthetic oligonucleotide
gccagaggtgggcct

SEQ ID NO: 4991 - DNA, 15 bp, Artificial Sequence
  Description of Artificial Sequence: Synthetic oligonucleotide
gccagaggaggtgct

SEQ ID NO: 4992 - DNA, 15 bp, Artificial Sequence
  Description of Artificial Sequence: Synthetic oligonucleotide
gccagagacggtact

SEQ ID NO: 4993 - DNA, 15 bp, Artificial Sequence
  Description of Artificial Sequence: Synthetic oligonucleotide
gccagaggtggaact

SEQ ID NO: 4994 - DNA, 15 bp, Artificial Sequence
  Description of Artificial Sequence: Synthetic oligonucleotide
gccagagagggagtg

SEQ ID NO: 4995 - DNA, 15 bp, Artificial Sequence
  Description of Artificial Sequence: Synthetic oligonucleotide
gccagaggtggcgtg

SEQ ID NO: 4996 - DNA, 12 bp, Artificial Sequence
  Description of Artificial Sequence: Synthetic oligonucleotide
gccagaagagga

SEQ ID NO: 4997 - DNA, 15 bp, Artificial Sequence
  Description of Artificial Sequence: Synthetic oligonucleotide
gccagagagcgtgga

SEQ ID NO: 4998 - DNA, 15 bp, Artificial Sequence
  Description of Artificial Sequence: Synthetic oligonucleotide
gccagagatcgtgga

SEQ ID NO: 4999 - DNA, 15 bp, Artificial Sequence
  Description of Artificial Sequence: Synthetic oligonucleotide
gccagaggcagggga

SEQ ID NO: 5000 - DNA, 12 bp, Artificial Sequence
  Description of Artificial Sequence: Synthetic oligonucleotide
gccagatcagga

SEQ ID NO: 5001 - DNA, 15 bp, Artificial Sequence
  Description of Artificial Sequence: Synthetic oligonucleotide
gccagagactcagga

SEQ ID NO: 5002 - DNA, 15 bp, Artificial Sequence
  Description of Artificial Sequence: Synthetic oligonucleotide
gccagagatccagga

SEQ ID NO: 5003 - DNA, 12 bp, Artificial Sequence
  Description of Artificial Sequence: Synthetic oligonucleotide
gccagattggga

SEQ ID NO: 5004 - DNA, 15 bp, Artificial Sequence
  Description of Artificial Sequence: Synthetic oligonucleotide
gccagagacttggga

SEQ ID NO: 5005 - DNA, 12 bp, Artificial Sequence
  Description of Artificial Sequence: Synthetic oligonucleotide
gccagagctgga

SEQ ID NO: 5006 - DNA, 12 bp, Artificial Sequence
  Description of Artificial Sequence: Synthetic oligonucleotide
gccagagtggga

SEQ ID NO: 5007 - DNA, 15 bp, Artificial Sequence
  Description of Artificial Sequence: Synthetic oligonucleotide
gccagaggcgtagga

SEQ ID NO: 5008 - DNA, 12 bp, Artificial Sequence
  Description of Artificial Sequence: Synthetic oligonucleotide
gccagacccaga

SEQ ID NO: 5009 - DNA, 15 bp, Artificial Sequence
  Description of Artificial Sequence: Synthetic oligonucleotide
gccagaggaccaaga

SEQ ID NO: 5010 - DNA, 12 bp, Artificial Sequence
  Description of Artificial Sequence: Synthetic oligonucleotide
gccagaccatct

SEQ ID NO: 5011 - DNA, 15 bp, Artificial Sequence
  Description of Artificial Sequence: Synthetic oligonucleotide
gccagagatccctct

SEQ ID NO: 5012 - DNA, 15 bp, Artificial Sequence
  Description of Artificial Sequence: Synthetic oligonucleotide
gcaagaggaccttct

SEQ ID NO: 5013 - DNA, 15 bp, Artificial Sequence
  Description of Artificial Sequence: Synthetic oligonucleotide
gccagagacccacct

SEQ ID NO: 5014 - DNA, 15 bp, Artificial Sequence
  Description of Artificial Sequence: Synthetic oligonucleotide
gccagaggaccgcct

SEQ ID NO: 5015 - DNA, 12 bp, Artificial Sequence
  Description of Artificial Sequence: Synthetic oligonucleotide
gccagaccgttg

SEQ ID NO: 5016 - DNA, 15 bp, Artificial Sequence
  Description of Artificial Sequence: Synthetic oligonucleotide
gccagagatcctttg

SEQ ID NO: 5017 - DNA, 12 bp, Artificial Sequence
  Description of Artificial Sequence: Synthetic oligonucleotide
gccagaaggcct

SEQ ID NO: 5018 - DNA, 15 bp, Artificial Sequence
  Description of Artificial Sequence: Synthetic oligonucleotide
gccagagaccgtcct

SEQ ID NO: 5019 - DNA, 12 bp, Artificial Sequence
  Description of Artificial Sequence: Synthetic oligonucleotide
gccagatcacct

SEQ ID NO: 5020 - DNA, 12 bp, Artificial Sequence
  Description of Artificial Sequence: Synthetic oligonucleotide
gccagacttcct

SEQ ID NO: 5021 - DNA, 12 bp, Artificial Sequence
  Description of Artificial Sequence: Synthetic oligonucleotide
gccagagcccct

SEQ ID NO: 5022 - DNA, 12 bp, Artificial Sequence
  Description of Artificial Sequence: Synthetic oligonucleotide
gccagaactcct

SEQ ID NO: 5023 - DNA, 12 bp, Artificial Sequence
  Description of Artificial Sequence: Synthetic oligonucleotide
gccagagtccct

SEQ ID NO: 5024 - DNA, 15 bp, Artificial Sequence
  Description of Artificial Sequence: Synthetic oligonucleotide
gccagagttggagga

SEQ ID NO: 5025 - DNA, 12 bp, Artificial Sequence
  Description of Artificial Sequence: Synthetic oligonucleotide
gccagggaccag

SEQ ID NO: 5026 - DNA, 12 bp, Artificial Sequence
  Description of Artificial Sequence: Synthetic oligonucleotide
gcaagagaccac

SEQ ID NO: 5027 - DNA, 12 bp, Artificial Sequence
  Description of Artificial Sequence: Synthetic oligonucleotide
gcaagggctaga

SEQ ID NO: 5028 - DNA, 12 bp, Artificial Sequence
  Description of Artificial Sequence: Synthetic oligonucleotide
gctagggcatct

SEQ ID NO: 5029 - DNA, 15 bp, Artificial Sequence
  Description of Artificial Sequence: Synthetic oligonucleotide
gctagggatcaggga

SEQ ID NO: 5030 - DNA, 12 bp, Artificial Sequence
  Description of Artificial Sequence: Synthetic oligonucleotide
gctagatcaaga

SEQ ID NO: 5031 - DNA, 15 bp, Artificial Sequence
  Description of Artificial Sequence: Synthetic oligonucleotide
gccagggacaggtct

SEQ ID NO: 5032 - DNA, 12 bp, Artificial Sequence
  Description of Artificial Sequence: Synthetic oligonucleotide
gctagatctttg

SEQ ID NO: 5033 - DNA, 12 bp, Artificial Sequence
  Description of Artificial Sequence: Synthetic oligonucleotide
gctaggttgcac

SEQ ID NO: 5034 - DNA, 15 bp, Artificial Sequence
  Description of Artificial Sequence: Synthetic oligonucleotide
gccagggatttgact

SEQ ID NO: 5035 - DNA, 12 bp, Artificial Sequence
  Description of Artificial Sequence: Synthetic oligonucleotide
gcaagagccgag

SEQ ID NO: 5036 - DNA, 15 bp, Artificial Sequence
  Description of Artificial Sequence: Synthetic oligonucleotide
gcaagggatttgtct

SEQ ID NO: 5037 - DNA, 12 bp, Artificial Sequence
  Description of Artificial Sequence: Synthetic oligonucleotide
gctagaggggac

SEQ ID NO: 5038 - DNA, 12 bp, Artificial Sequence
  Description of Artificial Sequence: Synthetic oligonucleotide
gctaggaggaga

SEQ ID NO: 5039 - DNA, 12 bp, Artificial Sequence
  Description of Artificial Sequence: Synthetic oligonucleotide
gctagagataag

SEQ ID NO: 5040 - DNA, 12 bp, Artificial Sequence
  Description of Artificial Sequence: Synthetic oligonucleotide
gctagagtatct

SEQ ID NO: 5041 - DNA, 15 bp, Artificial Sequence
  Description of Artificial Sequence: Synthetic oligonucleotide
gccagagacaggttg

SEQ ID NO: 5042 - DNA, 12 bp, Artificial Sequence
  Description of Artificial Sequence: Synthetic oligonucleotide
gctaggggccag

SEQ ID NO: 5043 - DNA, 12 bp, Artificial Sequence
  Description of Artificial Sequence: Synthetic oligonucleotide
gccagggtcaga

SEQ ID NO: 5044 - DNA, 12 bp, Artificial Sequence
  Description of Artificial Sequence: Synthetic oligonucleotide
gctagggctaag

SEQ ID NO: 5045 - DNA, 12 bp, Artificial Sequence
  Description of Artificial Sequence: Synthetic oligonucleotide
gccaggggtaag

SEQ ID NO: 5046 - DNA, 15 bp, Artificial Sequence
  Description of Artificial Sequence: Synthetic oligonucleotide
gcaagggatatttct

SEQ ID NO: 5047 - DNA, 15 bp, Artificial Sequence
  Description of Artificial Sequence: Synthetic oligonucleotide
gctagggatttcact

SEQ ID NO: 5048 - DNA, 12 bp, Artificial Sequence
  Description of Artificial Sequence: Synthetic oligonucleotide
gccaggcaggga

SEQ ID NO: 5049 - DNA, 12 bp, Artificial Sequence
  Description of Artificial Sequence: Synthetic oligonucleotide
gccaaggaagga

SEQ ID NO: 5050 - DNA, 12 bp, Artificial Sequence
  Description of Artificial Sequence: Synthetic oligonucleotide
gccaaggacgga

SEQ ID NO: 5051 - DNA, 12 bp, Artificial Sequence
  Description of Artificial Sequence: Synthetic oligonucleotide
gccaagggcgga

SEQ ID NO: 5052 - DNA, 12 bp, Artificial Sequence
  Description of Artificial Sequence: Synthetic oligonucleotide
gccaaggaaaga

SEQ ID NO: 5053 - DNA, 12 bp, Artificial Sequence
  Description of Artificial Sequence: Synthetic oligonucleotide
gccaaggacaga

SEQ ID NO: 5054 - DNA, 12 bp, Artificial Sequence
  Description of Artificial Sequence: Synthetic oligonucleotide
gccaagggcaga

SEQ ID NO: 5055 - DNA, 12 bp, Artificial Sequence
  Description of Artificial Sequence: Synthetic oligonucleotide
gccaaggaatct

SEQ ID NO: 5056 - DNA, 12 bp, Artificial Sequence
  Description of Artificial Sequence: Synthetic oligonucleotide
gccaaggattct

SEQ ID NO: 5057 - DNA, 12 bp, Artificial Sequence
  Description of Artificial Sequence: Synthetic oligonucleotide
gccaagggatct

SEQ ID NO: 5058 - DNA, 12 bp, Artificial Sequence
  Description of Artificial Sequence: Synthetic oligonucleotide
gccaaggatcct

SEQ ID NO: 5059 - DNA, 12 bp, Artificial Sequence
  Description of Artificial Sequence: Synthetic oligonucleotide
gccaagggtcct

SEQ ID NO: 5060 - DNA, 12 bp, Artificial Sequence
  Description of Artificial Sequence: Synthetic oligonucleotide
gccaaggacttg

SEQ ID NO: 5061 - DNA, 12 bp, Artificial Sequence
  Description of Artificial Sequence: Synthetic oligonucleotide
gccaaggggttg

SEQ ID NO: 5062 - DNA, 12 bp, Artificial Sequence
  Description of Artificial Sequence: Synthetic oligonucleotide
gccaaggaagct

SEQ ID NO: 5063 - DNA, 12 bp, Artificial Sequence
  Description of Artificial Sequence: Synthetic oligonucleotide
gccaaggacgct

SEQ ID NO: 5064 - DNA, 12 bp, Artificial Sequence
  Description of Artificial Sequence: Synthetic oligonucleotide
gccaagggcgct

SEQ ID NO: 5065 - DNA, 12 bp, Artificial Sequence
  Description of Artificial Sequence: Synthetic oligonucleotide
gccaaggaaact

SEQ ID NO: 5066 - DNA, 12 bp, Artificial Sequence
  Description of Artificial Sequence: Synthetic oligonucleotide
gccaaggatact

SEQ ID NO: 5067 - DNA, 12 bp, Artificial Sequence
  Description of Artificial Sequence: Synthetic oligonucleotide
gccaagggaact

SEQ ID NO: 5068 - DNA, 12 bp, Artificial Sequence
  Description of Artificial Sequence: Synthetic oligonucleotide
gccaaggaagtg

SEQ ID NO: 5069 - DNA, 12 bp, Artificial Sequence
  Description of Artificial Sequence: Synthetic oligonucleotide
gccaaggacgtg

SEQ ID NO: 5070 - DNA, 12 bp, Artificial Sequence
  Description of Artificial Sequence: Synthetic oligonucleotide
gccaagggcgtg

SEQ ID NO: 5071 - DNA, 15 bp, Artificial Sequence
  Description of Artificial Sequence: Synthetic oligonucleotide
gccaaggagggagga

SEQ ID NO: 5072 - DNA, 15 bp, Artificial Sequence
  Description of Artificial Sequence: Synthetic oligonucleotide
gccaaggacggtgga

SEQ ID NO: 5073 - DNA, 15 bp, Artificial Sequence
  Description of Artificial Sequence: Synthetic oligonucleotide
gccaagggaggagga

SEQ ID NO: 5074 - DNA, 15 bp, Artificial Sequence
  Description of Artificial Sequence: Synthetic oligonucleotide
gccaaggacggtaga

SEQ ID NO: 5075 - DNA, 15 bp, Artificial Sequence
  Description of Artificial Sequence: Synthetic oligonucleotide
gccaagggaggttct

SEQ ID NO: 5076 - DNA, 15 bp, Artificial Sequence
  Description of Artificial Sequence: Synthetic oligonucleotide
gccaagggaggtcct

SEQ ID NO: 5077 - DNA, 15 bp, Artificial Sequence
  Description of Artificial Sequence: Synthetic oligonucleotide
gccaagggaggcgct

SEQ ID NO: 5078 - DNA, 15 bp, Artificial Sequence
  Description of Artificial Sequence: Synthetic oligonucleotide
gccaaggatggcact

SEQ ID NO: 5079 - DNA, 15 bp, Artificial Sequence
  Description of Artificial Sequence: Synthetic oligonucleotide
gccaagggaggcact

SEQ ID NO: 5080 - DNA, 15 bp, Artificial Sequence
  Description of Artificial Sequence: Synthetic oligonucleotide
gccaaggaaggagtg

SEQ ID NO: 5081 - DNA, 15 bp, Artificial Sequence
  Description of Artificial Sequence: Synthetic oligonucleotide
gccaagggcggtgtg

SEQ ID NO: 5082 - DNA, 12 bp, Artificial Sequence
  Description of Artificial Sequence: Synthetic oligonucleotide
gccaagagagga

SEQ ID NO: 5083 - DNA, 15 bp, Artificial Sequence
  Description of Artificial Sequence: Synthetic oligonucleotide
gccaaggagagagga

SEQ ID NO: 5084 - DNA, 15 bp, Artificial Sequence
  Description of Artificial Sequence: Synthetic oligonucleotide
gccaaggatagggga

SEQ ID NO: 5085 - DNA, 15 bp, Artificial Sequence
  Description of Artificial Sequence: Synthetic oligonucleotide
gccaagggtagggga

SEQ ID NO: 5086 - DNA, 12 bp, Artificial Sequence
  Description of Artificial Sequence: Synthetic oligonucleotide
gccaagtctgga

SEQ ID NO: 5087 - DNA, 15 bp, Artificial Sequence
  Description of Artificial Sequence: Synthetic oligonucleotide
gccaaggatagtgga

SEQ ID NO: 5088 - DNA, 15 bp, Artificial Sequence
  Description of Artificial Sequence: Synthetic oligonucleotide
gccaaggaccccgga

SEQ ID NO: 5089 - DNA, 12 bp, Artificial Sequence
  Description of Artificial Sequence: Synthetic oligonucleotide
gccaagttagga

SEQ ID NO: 5090 - DNA, 15 bp, Artificial Sequence
  Description of Artificial Sequence: Synthetic oligonucleotide
gccaaggatcttgga

SEQ ID NO: 5091 - DNA, 12 bp, Artificial Sequence
  Description of Artificial Sequence: Synthetic oligonucleotide
gccaaggctgga

SEQ ID NO: 5092 - DNA, 12 bp, Artificial Sequence
  Description of Artificial Sequence: Synthetic oligonucleotide
gccaaggtagga

SEQ ID NO: 5093 - DNA, 15 bp, Artificial Sequence
  Description of Artificial Sequence: Synthetic oligonucleotide
gccaagggtgtcgga

SEQ ID NO: 5094 - DNA, 12 bp, Artificial Sequence
  Description of Artificial Sequence: Synthetic oligonucleotide
gccaagcctaga

SEQ ID NO: 5095 - DNA, 15 bp, Artificial Sequence
  Description of Artificial Sequence: Synthetic oligonucleotide
gccaagggccccaga

SEQ ID NO: 5096 - DNA, 12 bp, Artificial Sequence
  Description of Artificial Sequence: Synthetic oligonucleotide
gccaagccttct

SEQ ID NO: 5097 - DNA, 15 bp, Artificial Sequence
  Description of Artificial Sequence: Synthetic oligonucleotide
gccaaggatccctct

SEQ ID NO: 5098 - DNA, 15 bp, Artificial Sequence
  Description of Artificial Sequence: Synthetic oligonucleotide
gccaaagggccatct

SEQ ID NO: 5099 - DNA, 15 bp, Artificial Sequence
  Description of Artificial Sequence: Synthetic oligonucleotide
gccaaggatccacct

SEQ ID NO: 5100 - DNA, 15 bp, Artificial Sequence
  Description of Artificial Sequence: Synthetic oligonucleotide
gccaagggccctcct

SEQ ID NO: 5101 - DNA, 12 bp, Artificial Sequence
  Description of Artificial Sequence: Synthetic oligonucleotide
gccaagccgttg

SEQ ID NO: 5102 - DNA, 15 bp, Artificial Sequence
  Description of Artificial Sequence: Synthetic oligonucleotide
gccaaggaccctttg

SEQ ID NO: 5103 - DNA, 12 bp, Artificial Sequence
  Description of Artificial Sequence: Synthetic oligonucleotide
gccaagaggcct

SEQ ID NO: 5104 - DNA, 15 bp, Artificial Sequence
  Description of Artificial Sequence: Synthetic oligonucleotide
gccaaggaccgtcct

SEQ ID NO: 5105 - DNA, 12 bp, Artificial Sequence
  Description of Artificial Sequence: Synthetic oligonucleotide
gccaagagtcct

SEQ ID NO: 5106 - DNA, 12 bp, Artificial Sequence
  Description of Artificial Sequence: Synthetic oligonucleotide
gccaagctacct

SEQ ID NO: 5107 - DNA, 12 bp, Artificial Sequence
  Description of Artificial Sequence: Synthetic oligonucleotide
gccaaggctcct

SEQ ID NO: 5108 - DNA, 12 bp, Artificial Sequence
  Description of Artificial Sequence: Synthetic oligonucleotide
gccaagacgcct

SEQ ID NO: 5109 - DNA, 12 bp, Artificial Sequence
  Description of Artificial Sequence: Synthetic oligonucleotide
gccaaggtacct

SEQ ID NO: 5110 - DNA, 15 bp, Artificial Sequence
  Description of Artificial Sequence: Synthetic oligonucleotide
gccaaggtgggtgga

SEQ ID NO: 5111 - DNA, 12 bp, Artificial Sequence
  Description of Artificial Sequence: Synthetic oligonucleotide
gccaaggatcag

SEQ ID NO: 5112 - DNA, 12 bp, Artificial Sequence
  Description of Artificial Sequence: Synthetic oligonucleotide
gctaaagaccac

SEQ ID NO: 5113 - DNA, 12 bp, Artificial Sequence
  Description of Artificial Sequence: Synthetic oligonucleotide
gccaaggcaaga

SEQ ID NO: 5114 - DNA, 12 bp, Artificial Sequence
  Description of Artificial Sequence: Synthetic oligonucleotide
gccaaggcatct

SEQ ID NO: 5115 - DNA, 15 bp, Artificial Sequence
  Description of Artificial Sequence: Synthetic oligonucleotide
gcaaaggatcaggga

SEQ ID NO: 5116 - DNA, 12 bp, Artificial Sequence
  Description of Artificial Sequence: Synthetic oligonucleotide
gccaagagtaga

SEQ ID NO: 5117 - DNA, 15 bp, Artificial Sequence
  Description of Artificial Sequence: Synthetic oligonucleotide
gcaaaagacaggtct

SEQ ID NO: 5118 - DNA, 12 bp, Artificial Sequence
  Description of Artificial Sequence: Synthetic oligonucleotide
gcaaagagcttg

SEQ ID NO: 5119 - DNA, 12 bp, Artificial Sequence
  Description of Artificial Sequence: Synthetic oligonucleotide
gctaaattgcac

SEQ ID NO: 5120 - DNA, 15 bp, Artificial Sequence
  Description of Artificial Sequence: Synthetic oligonucleotide
gccaaggacttgact

SEQ ID NO: 5121 - DNA, 12 bp, Artificial Sequence
  Description of Artificial Sequence: Synthetic oligonucleotide
gctaaagcagag

SEQ ID NO: 5122 - DNA, 15 bp, Artificial Sequence
  Description of Artificial Sequence: Synthetic oligonucleotide
gcaaaagacttgtct

SEQ ID NO: 5123 - DNA, 12 bp, Artificial Sequence
  Description of Artificial Sequence: Synthetic oligonucleotide
gcaaaaggggac

SEQ ID NO: 5124 - DNA, 12 bp, Artificial Sequence
  Description of Artificial Sequence: Synthetic oligonucleotide
gcaaaaaggaga

SEQ ID NO: 5125 - DNA, 12 bp, Artificial Sequence
  Description of Artificial Sequence: Synthetic oligonucleotide
gcaaaagacaag

SEQ ID NO: 5126 - DNA, 12 bp, Artificial Sequence
  Description of Artificial Sequence: Synthetic oligonucleotide
gccaaagtatct

SEQ ID NO: 5127 - DNA, 15 bp, Artificial Sequence
  Description of Artificial Sequence: Synthetic oligonucleotide
gcaaaagacaggttg

SEQ ID NO: 5128 - DNA, 12 bp, Artificial Sequence
  Description of Artificial Sequence: Synthetic oligonucleotide
gccaaaggacag

SEQ ID NO: 5129 - DNA, 12 bp, Artificial Sequence
  Description of Artificial Sequence: Synthetic oligonucleotide
gcaaaagtcaga

SEQ ID NO: 5130 - DNA, 12 bp, Artificial Sequence
  Description of Artificial Sequence: Synthetic oligonucleotide
gcaaaggcaaag

SEQ ID NO: 5131 - DNA, 12 bp, Artificial Sequence
  Description of Artificial Sequence: Synthetic oligonucleotide
gcaaagggcaag

SEQ ID NO: 5132 - DNA, 15 bp, Artificial Sequence
  Description of Artificial Sequence: Synthetic oligonucleotide
gcaaaggacatttct

SEQ ID NO: 5133 - DNA, 15 bp, Artificial Sequence
  Description of Artificial Sequence: Synthetic oligonucleotide
gctaaagatttcact

SEQ ID NO: 5134 - DNA, 12 bp, Artificial Sequence
  Description of Artificial Sequence: Synthetic oligonucleotide
gccaagcaagga

SEQ ID NO: 5135 - DNA, 12 bp, Artificial Sequence
  Description of Artificial Sequence: Synthetic oligonucleotide
gttggcgcaact

SEQ ID NO: 5136 - DNA, 15 bp, Artificial Sequence
  Description of Artificial Sequence: Synthetic oligonucleotide
tactctggctcttat

SEQ ID NO: 5137 - DNA, 18 bp, Artificial Sequence
  Description of Artificial Sequence: Synthetic oligonucleotide
tgtagtagtacaagttgc

SEQ ID NO: 5138 - DNA, 21 bp, Artificial Sequence
  Description of Artificial Sequence: Synthetic oligonucleotide
tgctcatctacatcatgctat

SEQ ID NO: 5139 - DNA, 21 bp, Artificial Sequence
  Description of Artificial Sequence: Synthetic oligonucleotide
tattgttcaagtacatcttgt

SEQ ID NO: 5140 - DNA, 24 bp, Artificial Sequence
  Description of Artificial Sequence: Synthetic oligonucleotide
gggtattgctccagtacctcatgt

SEQ ID NO: 5141 - DNA, 24 bp, Artificial Sequence
  Description of Artificial Sequence: Synthetic oligonucleotide
tactgcagcagcacaagttgttac

SEQ ID NO: 5142 - DNA, 27 bp, Artificial Sequence
  Description of Artificial Sequence: Synthetic oligonucleotide
gggtattgcagttcaactagttgttat

SEQ ID NO: 5143 - DNA, 27 bp, Artificial Sequence
  Description of Artificial Sequence: Synthetic oligonucleotide
tactgttcatcaacctcctgttatact

SEQ ID NO: 5144 - DNA, 21 bp, Artificial Sequence
  Description of Artificial Sequence: Synthetic oligonucleotide
tgctctgggggtagctgctat

SEQ ID NO: 5145 - DNA, 21 bp, Artificial Sequence
  Description of Artificial Sequence: Synthetic oligonucleotide
tactgtagcggtggtagttgc

SEQ ID NO: 5146 - DNA, 24 bp, Artificial Sequence
  Description of Artificial Sequence: Synthetic oligonucleotide
ggatactgtagtggcggatcctgc

SEQ ID NO: 5147 - DNA, 24 bp, Artificial Sequence
  Description of Artificial Sequence: Synthetic oligonucleotide
tactgctccggaggaagttgttat

SEQ ID NO: 5148 - DNA, 27 bp, Artificial Sequence
  Description of Artificial Sequence: Synthetic oligonucleotide
ggttattgcagtgggggttcatgttac

SEQ ID NO: 5149 - DNA, 27 bp, Artificial Sequence
  Description of Artificial Sequence: Synthetic oligonucleotide
tactgttccggaggtagctgttactct

SEQ ID NO: 5150 - DNA, 24 bp, Artificial Sequence
  Description of Artificial Sequence: Synthetic oligonucleotide
gcctattgcggtggtgactgctat

SEQ ID NO: 5151 - DNA, 21 bp, Artificial Sequence
  Description of Artificial Sequence: Synthetic oligonucleotide
gcatattgcggaggggattgc

SEQ ID NO: 5152 - DNA, 21 bp, Artificial Sequence
  Description of Artificial Sequence: Synthetic oligonucleotide
tattgtggtggggactgctat

SEQ ID NO: 5153 - DNA, 18 bp, Artificial Sequence
  Description of Artificial Sequence: Synthetic oligonucleotide
tactgcggaggcgattgc

SEQ ID NO: 5154 - DNA, 30 bp, Artificial Sequence
  Description of Artificial Sequence: Synthetic oligonucleotide
gggtactgctctagcacttcatgctacgcc

SEQ ID NO: 5155 - DNA, 15 bp, Artificial Sequence
  Description of Artificial Sequence: Synthetic oligonucleotide
ccagcagctatgcct

SEQ ID NO: 5156 - DNA, 15 bp, Artificial Sequence
  Description of Artificial Sequence: Synthetic oligonucleotide
gtctatgcaattcct

SEQ ID NO: 5157 - DNA, 12 bp, Artificial Sequence
  Description of Artificial Sequence: Synthetic oligonucleotide
tggtttggggag

SEQ ID NO: 5158 - DNA, 12 bp, Artificial Sequence
  Description of Artificial Sequence: Synthetic oligonucleotide
agtggatcttat

SEQ ID NO: 5159 - DNA, 12 bp, Artificial Sequence
  Description of Artificial Sequence: Synthetic oligonucleotide
tattatggcagt

SEQ ID NO: 5160 - DNA, 12 bp, Artificial Sequence
  Description of Artificial Sequence: Synthetic oligonucleotide
tactactatggc

SEQ ID NO: 5161 - DNA, 15 bp, Artificial Sequence
  Description of Artificial Sequence: Synthetic oligonucleotide
ggcagcggttcctac

SEQ ID NO: 5162 - DNA, 15 bp, Artificial Sequence
  Description of Artificial Sequence: Synthetic oligonucleotide
agtggatcctattac

SEQ ID NO: 5163 - DNA, 18 bp, Artificial Sequence
  Description of Artificial Sequence: Synthetic oligonucleotide
tattactacgggtctggc

SEQ ID NO: 5164 - DNA, 21 bp, Artificial Sequence
  Description of Artificial Sequence: Synthetic oligonucleotide
tattactacggatctggctct

SEQ ID NO: 5165 - DNA, 24 bp, Artificial Sequence
  Description of Artificial Sequence: Synthetic oligonucleotide
tattactatggctctggtagctac

SEQ ID NO: 5166 - DNA, 12 bp, Artificial Sequence
  Description of Artificial Sequence: Synthetic oligonucleotide
atggtaagaggt

SEQ ID NO: 5167 - DNA, 15 bp, Artificial Sequence
  Description of Artificial Sequence: Synthetic oligonucleotide
accatggtgaggggt

SEQ ID NO: 5168 - DNA, 36 bp, Artificial Sequence
  Description of Artificial Sequence: Synthetic oligonucleotide
tactatgattacgtctgggggtcttatgcttacact

SEQ ID NO: 5169 - DNA, 33 bp, Artificial Sequence
  Description of Artificial Sequence: Synthetic oligonucleotide
tactacgactatgtatggggctcatatgcttac

SEQ ID NO: 5170 - DNA, 30 bp, Artificial Sequence
  Description of Artificial Sequence: Synthetic oligonucleotide
tactacgattacgtatggggaagctacgct

SEQ ID NO: 5171 - DNA, 30 bp, Artificial Sequence
  Description of Artificial Sequence: Synthetic oligonucleotide
tatgattatgtgtgggggtcatacgcatac

SEQ ID NO: 5172 - DNA, 30 bp, Artificial Sequence
  Description of Artificial Sequence: Synthetic oligonucleotide
gattatgtgtgggggtcttacgcctacacc

SEQ ID NO: 5173 - DNA, 27 bp, Artificial Sequence
  Description of Artificial Sequence: Synthetic oligonucleotide
tacgactatgtgtggggttcctatgct

SEQ ID NO: 5174 - DNA, 12 bp, Artificial Sequence
  Description of Artificial Sequence: Synthetic oligonucleotide
tactacgattcc

SEQ ID NO: 5175 - DNA, 12 bp, Artificial Sequence
  Description of Artificial Sequence: Synthetic oligonucleotide
tattattatgac

SEQ ID NO: 5176 - DNA, 15 bp, Artificial Sequence
  Description of Artificial Sequence: Synthetic oligonucleotide
gacagttccgggtac

SEQ ID NO: 5177 - DNA, 15 bp, Artificial Sequence
  Description of Artificial Sequence: Synthetic oligonucleotide
tatgatagctcaggt

SEQ ID NO: 5178 - DNA, 15 bp, Artificial Sequence
  Description of Artificial Sequence: Synthetic oligonucleotide
tactatgactcatcc

SEQ ID NO: 5179 - DNA, 15 bp, Artificial Sequence
  Description of Artificial Sequence: Synthetic oligonucleotide
tattattacgatagt

SEQ ID NO: 5180 - DNA, 18 bp, Artificial Sequence
  Description of Artificial Sequence: Synthetic oligonucleotide
gattcttccgggtactac

SEQ ID NO: 5181 - DNA, 18 bp, Artificial Sequence
  Description of Artificial Sequence: Synthetic oligonucleotide
tatgattccagcggatac

SEQ ID NO: 5182 - DNA, 18 bp, Artificial Sequence
  Description of Artificial Sequence: Synthetic oligonucleotide
tactacgatagctccggt

SEQ ID NO: 5183 - DNA, 18 bp, Artificial Sequence
  Description of Artificial Sequence: Synthetic oligonucleotide
tattattacgactcttcc

SEQ ID NO: 5184 - DNA, 21 bp, Artificial Sequence
  Description of Artificial Sequence: Synthetic oligonucleotide
tacgactcttctggttattac

SEQ ID NO: 5185 - DNA, 21 bp, Artificial Sequence
  Description of Artificial Sequence: Synthetic oligonucleotide
tattatgacagcagcgggtat

SEQ ID NO: 5186 - DNA, 21 bp, Artificial Sequence
  Description of Artificial Sequence: Synthetic oligonucleotide
tactactacgattccagcggt

SEQ ID NO: 5187 - DNA, 24 bp, Artificial Sequence
  Description of Artificial Sequence: Synthetic oligonucleotide
tacgacagttccggatattattac

SEQ ID NO: 5188 - DNA, 24 bp, Artificial Sequence
  Description of Artificial Sequence: Synthetic oligonucleotide
tactatgatagtagtgggtactat

SEQ ID NO: 5189 - DNA, 24 bp, Artificial Sequence
  Description of Artificial Sequence: Synthetic oligonucleotide
tactactatgacagctcagggtat

SEQ ID NO: 5190 - DNA, 27 bp, Artificial Sequence
  Description of Artificial Sequence: Synthetic oligonucleotide
tattacgacagcagtggctactactat

SEQ ID NO: 5191 - DNA, 27 bp, Artificial Sequence
  Description of Artificial Sequence: Synthetic oligonucleotide
tactactacgatagctctggatactat

SEQ ID NO: 5192 - DNA, 30 bp, Artificial Sequence
  Description of Artificial Sequence: Synthetic oligonucleotide
tattattacgattccagtggttattattat

SEQ ID NO: 5193 - DNA, 12 bp, Artificial Sequence
  Description of Artificial Sequence: Synthetic oligonucleotide
gactcatccggt

SEQ ID NO: 5194 - DNA, 12 bp, Artificial Sequence
  Description of Artificial Sequence: Synthetic oligonucleotide
ggttactattac

SEQ ID NO: 5195 - DNA, 12 bp, Artificial Sequence
  Description of Artificial Sequence: Synthetic oligonucleotide
agcggctactat

SEQ ID NO: 5196 - DNA, 15 bp, Artificial Sequence
  Description of Artificial Sequence: Synthetic oligonucleotide
agatttttggagtgg

SEQ ID NO: 5197 - DNA, 30 bp, Artificial Sequence
  Description of Artificial Sequence: Synthetic oligonucleotide
tactatgatttttggagtggatattatacc

SEQ ID NO: 5198 - DNA, 18 bp, Artificial Sequence
  Description of Artificial Sequence: Synthetic oligonucleotide
tatgatttttggtctggt

SEQ ID NO: 5199 - DNA, 18 bp, Artificial Sequence
  Description of Artificial Sequence: Synthetic oligonucleotide
gatttttggagcggctat

SEQ ID NO: 5200 - DNA, 15 bp, Artificial Sequence
  Description of Artificial Sequence: Synthetic oligonucleotide
ttttggagcgggtat

SEQ ID NO: 5201 - DNA, 27 bp, Artificial Sequence
  Description of Artificial Sequence: Synthetic oligonucleotide
tactacgacttctggagcgggtattac

SEQ ID NO: 5202 - DNA, 24 bp, Artificial Sequence
  Description of Artificial Sequence: Synthetic oligonucleotide
tactacgatttttggtctggatat

SEQ ID NO: 5203 - DNA, 24 bp, Artificial Sequence
  Description of Artificial Sequence: Synthetic oligonucleotide
tatgacttttggagtggttactac

SEQ ID NO: 5204 - DNA, 21 bp, Artificial Sequence
  Description of Artificial Sequence: Synthetic oligonucleotide
tactacgatttctggtcaggc

SEQ ID NO: 5205 - DNA, 21 bp, Artificial Sequence
  Description of Artificial Sequence: Synthetic oligonucleotide
tatgacttctggagtggttac

SEQ ID NO: 5206 - DNA, 21 bp, Artificial Sequence
  Description of Artificial Sequence: Synthetic oligonucleotide
gacttctggtcaggatactac

SEQ ID NO: 5207 - DNA, 15 bp, Artificial Sequence
  Description of Artificial Sequence: Synthetic oligonucleotide
gtgttgaggtacttc

SEQ ID NO: 5208 - DNA, 15 bp, Artificial Sequence
  Description of Artificial Sequence: Synthetic oligonucleotide
ttaagatactttgat

SEQ ID NO: 5209 - DNA, 15 bp, Artificial Sequence
  Description of Artificial Sequence: Synthetic oligonucleotide
agatactttgattgg

SEQ ID NO: 5210 - DNA, 12 bp, Artificial Sequence
  Description of Artificial Sequence: Synthetic oligonucleotide
gtgttgaggtat

SEQ ID NO: 5211 - DNA, 12 bp, Artificial Sequence
  Description of Artificial Sequence: Synthetic oligonucleotide
ttgagatatttc

SEQ ID NO: 5212 - DNA, 12 bp, Artificial Sequence
  Description of Artificial Sequence: Synthetic oligonucleotide
agatactttgat

SEQ ID NO: 5213 - DNA, 24 bp, Artificial Sequence
  Description of Artificial Sequence: Synthetic oligonucleotide
gtcttaaggtacttcgattggctt

SEQ ID NO: 5214 - DNA, 21 bp, Artificial Sequence
  Description of Artificial Sequence: Synthetic oligonucleotide
gtcttaagatactttgattgg

SEQ ID NO: 5215 - DNA, 18 bp, Artificial Sequence
  Description of Artificial Sequence: Synthetic oligonucleotide
gtgttgaggtactttgac

SEQ ID NO: 5216 - DNA, 18 bp, Artificial Sequence
  Description of Artificial Sequence: Synthetic oligonucleotide
ttaagatacttcgattgg

SEQ ID NO: 5217 - DNA, 18 bp, Artificial Sequence
  Description of Artificial Sequence: Synthetic oligonucleotide
agatatttcgactggctt

SEQ ID NO: 5218 - DNA, 24 bp, Artificial Sequence
  Description of Artificial Sequence: Synthetic oligonucleotide
tatgacatattgactggctactac

SEQ ID NO: 5219 - DNA, 21 bp, Artificial Sequence
  Description of Artificial Sequence: Synthetic oligonucleotide
tatgatatattaactgggtac

SEQ ID NO: 5220 - DNA, 21 bp, Artificial Sequence
  Description of Artificial Sequence: Synthetic oligonucleotide
gatatcttaaccgggtattat

SEQ ID NO: 5221 - DNA, 12 bp, Artificial Sequence
  Description of Artificial Sequence: Synthetic oligonucleotide
gattacggcgat

SEQ ID NO: 5222 - DNA, 12 bp, Artificial Sequence
  Description of Artificial Sequence: Synthetic oligonucleotide
tacggcgattat

SEQ ID NO: 5223 - DNA, 15 bp, Artificial Sequence
  Description of Artificial Sequence: Synthetic oligonucleotide
gactacggagattat

SEQ ID NO: 5224 - DNA, 15 bp, Artificial Sequence
  Description of Artificial Sequence: Synthetic oligonucleotide
accacagtaaccacc

SEQ ID NO: 5225 - DNA, 12 bp, Artificial Sequence
  Description of Artificial Sequence: Synthetic oligonucleotide
acaactgtgact

SEQ ID NO: 5226 - DNA, 12 bp, Artificial Sequence
  Description of Artificial Sequence: Synthetic oligonucleotide
acagtaactact

SEQ ID NO: 5227 - DNA, 18 bp, Artificial Sequence
  Description of Artificial Sequence: Synthetic oligonucleotide
ggctactcaggatacgac

SEQ ID NO: 5228 - DNA, 15 bp, Artificial Sequence
  Description of Artificial Sequence: Synthetic oligonucleotide
tatagcggatatgac

SEQ ID NO: 5229 - DNA, 12 bp, Artificial Sequence
  Description of Artificial Sequence: Synthetic oligonucleotide
agagatggttac

SEQ ID NO: 5230 - DNA, 12 bp, Artificial Sequence
  Description of Artificial Sequence: Synthetic oligonucleotide
gatactgctatg

SEQ ID NO: 5231 - DNA, 12 bp, Artificial Sequence
  Description of Artificial Sequence: Synthetic oligonucleotide
tattcatatggt

SEQ ID NO: 5232 - DNA, 15 bp, Artificial Sequence
  Description of Artificial Sequence: Synthetic oligonucleotide
ggatatagttatggc

SEQ ID NO: 5233 - DNA, 18 bp, Artificial Sequence
  Description of Artificial Sequence: Synthetic oligonucleotide
tacagtagctcttggtac

SEQ ID NO: 5234 - DNA, 21 bp, Artificial Sequence
  Description of Artificial Sequence: Synthetic oligonucleotide
ggctacagttcaagctggtat

SEQ ID NO: 5235 - DNA, 12 bp, Artificial Sequence
  Description of Artificial Sequence: Synthetic oligonucleotide
agtagctcttgg

SEQ ID NO: 5236 - DNA, 12 bp, Artificial Sequence
  Description of Artificial Sequence: Synthetic oligonucleotide
tacagcagctcc

SEQ ID NO: 5237 - DNA, 15 bp, Artificial Sequence
  Description of Artificial Sequence: Synthetic oligonucleotide
tactcttcctcatgg

SEQ ID NO: 5238 - DNA, 12 bp, Artificial Sequence
  Description of Artificial Sequence: Synthetic oligonucleotide
cagcaattggtt

SEQ ID NO: 5239 - DNA, 15 bp, Artificial Sequence
  Description of Artificial Sequence: Synthetic oligonucleotide
agctctggatggtac

SEQ ID NO: 5240 - DNA, 15 bp, Artificial Sequence
  Description of Artificial Sequence: Synthetic oligonucleotide
tatagtagcggatgg

SEQ ID NO: 5241 - DNA, 18 bp, Artificial Sequence
  Description of Artificial Sequence: Synthetic oligonucleotide
tatagcagcggttggtac

SEQ ID NO: 5242 - DNA, 21 bp, Artificial Sequence
  Description of Artificial Sequence: Synthetic oligonucleotide
ggttattcatcaggttggtat

SEQ ID NO: 5243 - DNA, 12 bp, Artificial Sequence
  Description of Artificial Sequence: Synthetic oligonucleotide
agtggttggtat

SEQ ID NO: 5244 - DNA, 12 bp, Artificial Sequence
  Description of Artificial Sequence: Synthetic oligonucleotide
agttccggttgg

SEQ ID NO: 5245 - DNA, 12 bp, Artificial Sequence
  Description of Artificial Sequence: Synthetic oligonucleotide
tactcaagtggt

SEQ ID NO: 5246 - DNA, 12 bp, Artificial Sequence
  Description of Artificial Sequence: Synthetic oligonucleotide
cagtggttagtt

SEQ ID NO: 5247 - DNA, 12 bp, Artificial Sequence
  Description of Artificial Sequence: Synthetic oligonucleotide
gagtactcatcc

SEQ ID NO: 5248 - DNA, 18 bp, Artificial Sequence
  Description of Artificial Sequence: Synthetic oligonucleotide
agcatagcagcaaggcct

SEQ ID NO: 5249 - DNA, 15 bp, Artificial Sequence
  Description of Artificial Sequence: Synthetic oligonucleotide
atagcagcaaggcct

SEQ ID NO: 5250 - DNA, 12 bp, Artificial Sequence
  Description of Artificial Sequence: Synthetic oligonucleotide
gccgcaagacct

SEQ ID NO: 5251 - DNA, 12 bp, Artificial Sequence
  Description of Artificial Sequence: Synthetic oligonucleotide
gccttcgatatc

SEQ ID NO: 5252 - DNA, 12 bp, Artificial Sequence
  Description of Artificial Sequence: Synthetic oligonucleotide
gccttcgattac

SEQ ID NO: 5253 - DNA, 12 bp, Artificial Sequence
  Description of Artificial Sequence: Synthetic oligonucleotide
gatttcgactat

SEQ ID NO: 5254 - DNA, 12 bp, Artificial Sequence
  Description of Artificial Sequence: Synthetic oligonucleotide
ttcttcgattac

SEQ ID NO: 5255 - DNA, 12 bp, Artificial Sequence
  Description of Artificial Sequence: Synthetic oligonucleotide
gggtttgaccca

SEQ ID NO: 5256 - DNA, 12 bp, Artificial Sequence
  Description of Artificial Sequence: Synthetic oligonucleotide
gggttcgactac

SEQ ID NO: 5257 - DNA, 12 bp, Artificial Sequence
  Description of Artificial Sequence: Synthetic oligonucleotide
ggcatggatgta

SEQ ID NO: 5258 - DNA, 12 bp, Artificial Sequence
  Description of Artificial Sequence: Synthetic oligonucleotide
cactttgactat

SEQ ID NO: 5259 - DNA, 12 bp, Artificial Sequence
  Description of Artificial Sequence: Synthetic oligonucleotide
atattcgattac

SEQ ID NO: 5260 - DNA, 12 bp, Artificial Sequence
  Description of Artificial Sequence: Synthetic oligonucleotide
ttatttgattat

SEQ ID NO: 5261 - DNA, 12 bp, Artificial Sequence
  Description of Artificial Sequence: Synthetic oligonucleotide
aactttgattac

SEQ ID NO: 5262 - DNA, 12 bp, Artificial Sequence
  Description of Artificial Sequence: Synthetic oligonucleotide
cccttcgactat

SEQ ID NO: 5263 - DNA, 12 bp, Artificial Sequence
  Description of Artificial Sequence: Synthetic oligonucleotide
aggtttgactat

SEQ ID NO: 5264 - DNA, 12 bp, Artificial Sequence
  Description of Artificial Sequence: Synthetic oligonucleotide
agtttcgattac

SEQ ID NO: 5265 - DNA, 12 bp, Artificial Sequence
  Description of Artificial Sequence: Synthetic oligonucleotide
acatttgactac

SEQ ID NO: 5266 - DNA, 12 bp, Artificial Sequence
  Description of Artificial Sequence: Synthetic oligonucleotide
gttttcgattat

SEQ ID NO: 5267 - DNA, 12 bp, Artificial Sequence
  Description of Artificial Sequence: Synthetic oligonucleotide
tggttcgatcca

SEQ ID NO: 5268 - DNA, 12 bp, Artificial Sequence
  Description of Artificial Sequence: Synthetic oligonucleotide
tatttcgactta

SEQ ID NO: 5269 - DNA, 12 bp, Artificial Sequence
  Description of Artificial Sequence: Synthetic oligonucleotide
tacttcgattac

SEQ ID NO: 5270 - DNA, 12 bp, Artificial Sequence
  Description of Artificial Sequence: Synthetic oligonucleotide
tatttccagcac

SEQ ID NO: 5271 - DNA, 12 bp, Artificial Sequence
  Description of Artificial Sequence: Synthetic oligonucleotide
tatatggatgtc

SEQ ID NO: 5272 - DNA, 15 bp, Artificial Sequence
  Description of Artificial Sequence: Synthetic oligonucleotide
gatgccttcgacata

SEQ ID NO: 5273 - DNA, 15 bp, Artificial Sequence
  Description of Artificial Sequence: Synthetic oligonucleotide
gactggtttgacccc

SEQ ID NO: 5274 - DNA, 15 bp, Artificial Sequence
  Description of Artificial Sequence: Synthetic oligonucleotide
gactactttgattac

SEQ ID NO: 5275 - DNA, 15 bp, Artificial Sequence
  Description of Artificial Sequence: Synthetic oligonucleotide
gaatacttccaacac

SEQ ID NO: 5276 - DNA, 15 bp, Artificial Sequence
  Description of Artificial Sequence: Synthetic oligonucleotide
ggcgcattcgatatt

SEQ ID NO: 5277 - DNA, 15 bp, Artificial Sequence
  Description of Artificial Sequence: Synthetic oligonucleotide
gggtggtttgatcca

SEQ ID NO: 5278 - DNA, 15 bp, Artificial Sequence
  Description of Artificial Sequence: Synthetic oligonucleotide
ggctattttgactac

SEQ ID NO: 5279 - DNA, 15 bp, Artificial Sequence
  Description of Artificial Sequence: Synthetic oligonucleotide
catgcttttgatata

SEQ ID NO: 5280 - DNA, 15 bp, Artificial Sequence
  Description of Artificial Sequence: Synthetic oligonucleotide
cattacttcgattac

SEQ ID NO: 5281 - DNA, 15 bp, Artificial Sequence
  Description of Artificial Sequence: Synthetic oligonucleotide
aacgcattcgatatt

SEQ ID NO: 5282 - DNA, 15 bp, Artificial Sequence
  Description of Artificial Sequence: Synthetic oligonucleotide
aactggttcgatcca

SEQ ID NO: 5283 - DNA, 15 bp, Artificial Sequence
  Description of Artificial Sequence: Synthetic oligonucleotide
aattatttcgactat

SEQ ID NO: 5284 - DNA, 15 bp, Artificial Sequence
  Description of Artificial Sequence: Synthetic oligonucleotide
ccctactttgactat

SEQ ID NO: 5285 - DNA, 15 bp, Artificial Sequence
  Description of Artificial Sequence: Synthetic oligonucleotide
agagcctttgatatc

SEQ ID NO: 5286 - DNA, 15 bp, Artificial Sequence
  Description of Artificial Sequence: Synthetic oligonucleotide
aggtacttcgattac

SEQ ID NO: 5287 - DNA, 15 bp, Artificial Sequence
  Description of Artificial Sequence: Synthetic oligonucleotide
tcatggttcgacccc

SEQ ID NO: 5288 - DNA, 15 bp, Artificial Sequence
  Description of Artificial Sequence: Synthetic oligonucleotide
agttactttgactat

SEQ ID NO: 5289 - DNA, 15 bp, Artificial Sequence
  Description of Artificial Sequence: Synthetic oligonucleotide
acttatttcgactac

SEQ ID NO: 5290 - DNA, 15 bp, Artificial Sequence
  Description of Artificial Sequence: Synthetic oligonucleotide
gtggccttcgacatt

SEQ ID NO: 5291 - DNA, 15 bp, Artificial Sequence
  Description of Artificial Sequence: Synthetic oligonucleotide
gtctattttgattat

SEQ ID NO: 5292 - DNA, 15 bp, Artificial Sequence
  Description of Artificial Sequence: Synthetic oligonucleotide
tggtatttcgatttg

SEQ ID NO: 5293 - DNA, 15 bp, Artificial Sequence
  Description of Artificial Sequence: Synthetic oligonucleotide
tacgcatttgacatc

SEQ ID NO: 5294 - DNA, 15 bp, Artificial Sequence
  Description of Artificial Sequence: Synthetic oligonucleotide
tacggcatggacgtg

SEQ ID NO: 5295 - DNA, 15 bp, Artificial Sequence
  Description of Artificial Sequence: Synthetic oligonucleotide
tattattttgattac

SEQ ID NO: 5296 - DNA, 15 bp, Artificial Sequence
  Description of Artificial Sequence: Synthetic oligonucleotide
tattatatggacgtc

SEQ ID NO: 5297 - DNA, 18 bp, Artificial Sequence
  Description of Artificial Sequence: Synthetic oligonucleotide
gcagagtacttccagcac

SEQ ID NO: 5298 - DNA, 18 bp, Artificial Sequence
  Description of Artificial Sequence: Synthetic oligonucleotide
gacaattggtttgatccc

SEQ ID NO: 5299 - DNA, 18 bp, Artificial Sequence
  Description of Artificial Sequence: Synthetic oligonucleotide
gattggtacttcgacttg

SEQ ID NO: 5300 - DNA, 18 bp, Artificial Sequence
  Description of Artificial Sequence: Synthetic oligonucleotide
gggaattggtttgatcct

SEQ ID NO: 5301 - DNA, 18 bp, Artificial Sequence
  Description of Artificial Sequence: Synthetic oligonucleotide
aactggtatttcgactta

SEQ ID NO: 5302 - DNA, 18 bp, Artificial Sequence
  Description of Artificial Sequence: Synthetic oligonucleotide
cccaattggtttgatcca

SEQ ID NO: 5303 - DNA, 18 bp, Artificial Sequence
  Description of Artificial Sequence: Synthetic oligonucleotide
agtaattggtttgacccc

SEQ ID NO: 5304 - DNA, 18 bp, Artificial Sequence
  Description of Artificial Sequence: Synthetic oligonucleotide
tataattggtttgatcct

SEQ ID NO: 5305 - DNA, 18 bp, Artificial Sequence
  Description of Artificial Sequence: Synthetic oligonucleotide
tattggtattttgatttg

SEQ ID NO: 5306 - DNA, 18 bp, Artificial Sequence
  Description of Artificial Sequence: Synthetic oligonucleotide
tactatgggatggacgtg

SEQ ID NO: 5307 - DNA, 18 bp, Artificial Sequence
  Description of Artificial Sequence: Synthetic oligonucleotide
tactattacatggacgtt

SEQ ID NO: 5308 - DNA, 21 bp, Artificial Sequence
  Description of Artificial Sequence: Synthetic oligonucleotide
tattattacggtatggacgtc

SEQ ID NO: 5309 - DNA, 21 bp, Artificial Sequence
  Description of Artificial Sequence: Synthetic oligonucleotide
tactattattacatggatgtc

SEQ ID NO: 5310 - DNA, 24 bp, Artificial Sequence
  Description of Artificial Sequence: Synthetic oligonucleotide
gactattattacggtatggatgtt

SEQ ID NO: 5311 - DNA, 24 bp, Artificial Sequence
  Description of Artificial Sequence: Synthetic oligonucleotide
ggctactattatggtatggacgtc

SEQ ID NO: 5312 - DNA, 24 bp, Artificial Sequence
  Description of Artificial Sequence: Synthetic oligonucleotide
cattactactatgggatggatgta

SEQ ID NO: 5313 - DNA, 24 bp, Artificial Sequence
  Description of Artificial Sequence: Synthetic oligonucleotide
aactattattattatatggatgtc

SEQ ID NO: 5314 - DNA, 24 bp, Artificial Sequence
  Description of Artificial Sequence: Synthetic oligonucleotide
ccctactactactatatggatgtg

SEQ ID NO: 5315 - DNA, 24 bp, Artificial Sequence
  Description of Artificial Sequence: Synthetic oligonucleotide
aggtattactactacatggacgtc

SEQ ID NO: 5316 - DNA, 24 bp, Artificial Sequence
  Description of Artificial Sequence: Synthetic oligonucleotide
tactattattatgggatggatgta

SEQ ID NO: 5317 - DNA, 27 bp, Artificial Sequence
  Description of Artificial Sequence: Synthetic oligonucleotide
gattactattattacggaatggatgtt

SEQ ID NO: 5318 - DNA, 27 bp, Artificial Sequence
  Description of Artificial Sequence: Synthetic oligonucleotide
gggtattactactacggcatggacgta

SEQ ID NO: 5319 - DNA, 27 bp, Artificial Sequence
  Description of Artificial Sequence: Synthetic oligonucleotide
aattactattactatggcatggatgtg

SEQ ID NO: 5320 - DNA, 27 bp, Artificial Sequence
  Description of Artificial Sequence: Synthetic oligonucleotide
ccatattactattacggcatggatgtc

SEQ ID NO: 5321 - DNA, 27 bp, Artificial Sequence
  Description of Artificial Sequence: Synthetic oligonucleotide
agctactactactacggaatggacgtc

SEQ ID NO: 5322 - DNA, 27 bp, Artificial Sequence
  Description of Artificial Sequence: Synthetic oligonucleotide
tactactactattacggtatggacgta

SEQ ID NO: 5323 - DNA, 30 bp, Artificial Sequence
  Description of Artificial Sequence: Synthetic oligonucleotide
gattattattactactactacatggatgta

SEQ ID NO: 5324 - DNA, 30 bp, Artificial Sequence
  Description of Artificial Sequence: Synthetic oligonucleotide
ggttattattactactatgggatggatgta

SEQ ID NO: 5325 - DNA, 30 bp, Artificial Sequence
  Description of Artificial Sequence: Synthetic oligonucleotide
cactactattattattacgggatggatgta

SEQ ID NO: 5326 - DNA, 30 bp, Artificial Sequence
  Description of Artificial Sequence: Synthetic oligonucleotide
agatactactactattattacatggatgta

SEQ ID NO: 5327 - DNA, 30 bp, Artificial Sequence
  Description of Artificial Sequence: Synthetic oligonucleotide
tattactactattactatggtatggacgtt

SEQ ID NO: 5328 - protein, 4 aa, Artificial Sequence
  Description of Artificial Sequence: Synthetic peptide
AREP

SEQ ID NO: 5329 - protein, 4 aa, Artificial Sequence
  Description of Artificial Sequence: Synthetic peptide
AKEP

SEQ ID NO: 5330 - protein, 4 aa, Artificial Sequence
  Description of Artificial Sequence: Synthetic peptide
AREL

SEQ ID NO: 5331 - protein, 4 aa, Artificial Sequence
  Description of Artificial Sequence: Synthetic peptide
AKEL

SEQ ID NO: 5332 - protein, 5 aa, Artificial Sequence
  Description of Artificial Sequence: Synthetic peptide
AREGR

SEQ ID NO: 5333 - protein, 5 aa, Artificial Sequence
  Description of Artificial Sequence: Synthetic peptide
AKEGR

SEQ ID NO: 5334 - protein, 5 aa, Artificial Sequence
  Description of Artificial Sequence: Synthetic peptide
ARGGR

SEQ ID NO: 5335 - protein, 5 aa, Artificial Sequence
  Description of Artificial Sequence: Synthetic peptide
AKGGR

SEQ ID NO: 5336 - protein, 5 aa, Artificial Sequence
  Description of Artificial Sequence: Synthetic peptide
AREGS

SEQ ID NO: 5337 - protein, 5 aa, Artificial Sequence
  Description of Artificial Sequence: Synthetic peptide
AKEGS

SEQ ID NO: 5338 - protein, 5 aa, Artificial Sequence
  Description of Artificial Sequence: Synthetic peptide
ARDGS

SEQ ID NO: 5339 - protein, 5 aa, Artificial Sequence
  Description of Artificial Sequence: Synthetic peptide
AKDGS

SEQ ID NO: 5340 - protein, 5 aa, Artificial Sequence
  Description of Artificial Sequence: Synthetic peptide
AREGP

SEQ ID NO: 5341 - protein, 5 aa, Artificial Sequence
  Description of Artificial Sequence: Synthetic peptide
AKEGP

SEQ ID NO: 5342 - protein, 5 aa, Artificial Sequence
  Description of Artificial Sequence: Synthetic peptide
ARDGP

SEQ ID NO: 5343 - protein, 5 aa, Artificial Sequence
  Description of Artificial Sequence: Synthetic peptide
AKDGP

SEQ ID NO: 5344 - protein, 5 aa, Artificial Sequence
  Description of Artificial Sequence: Synthetic peptide
AREGL

SEQ ID NO: 5345 - protein, 5 aa, Artificial Sequence
  Description of Artificial Sequence: Synthetic peptide
AKEGL

SEQ ID NO: 5346 - protein, 5 aa, Artificial Sequence
  Description of Artificial Sequence: Synthetic peptide
ARDGL

SEQ ID NO: 5347 - protein, 5 aa, Artificial Sequence
  Description of Artificial Sequence: Synthetic peptide
AKDGL

SEQ ID NO: 5348 - protein, 5 aa, Artificial Sequence
  Description of Artificial Sequence: Synthetic peptide
ARGGL

SEQ ID NO: 5349 - protein, 5 aa, Artificial Sequence
  Description of Artificial Sequence: Synthetic peptide
AKGGL

SEQ ID NO: 5350 - protein, 5 aa, Artificial Sequence
  Description of Artificial Sequence: Synthetic peptide
AREGA

SEQ ID NO: 5351 - protein, 5 aa, Artificial Sequence
  Description of Artificial Sequence: Synthetic peptide
AKEGA

SEQ ID NO: 5352 - protein, 5 aa, Artificial Sequence
  Description of Artificial Sequence: Synthetic peptide
ARDGA

SEQ ID NO: 5353 - protein, 5 aa, Artificial Sequence
  Description of Artificial Sequence: Synthetic peptide
AKDGA

SEQ ID NO: 5354 - protein, 5 aa, Artificial Sequence
  Description of Artificial Sequence: Synthetic peptide
ARDGV

SEQ ID NO: 5355 - protein, 5 aa, Artificial Sequence
  Description of Artificial Sequence: Synthetic peptide
AKDGV

SEQ ID NO: 5356 - protein, 5 aa, Artificial Sequence
  Description of Artificial Sequence: Synthetic peptide
ARESG

SEQ ID NO: 5357 - protein, 5 aa, Artificial Sequence
  Description of Artificial Sequence: Synthetic peptide
AKESG

SEQ ID NO: 5358 - protein, 5 aa, Artificial Sequence
  Description of Artificial Sequence: Synthetic peptide
ARGSG

SEQ ID NO: 5359 - protein, 5 aa, Artificial Sequence
  Description of Artificial Sequence: Synthetic peptide
AKGSG

SEQ ID NO: 5360 - protein, 4 aa, Artificial Sequence
  Description of Artificial Sequence: Synthetic peptide
ARPG

SEQ ID NO: 5361 - protein, 4 aa, Artificial Sequence
  Description of Artificial Sequence: Synthetic peptide
AKPG

SEQ ID NO: 5362 - protein, 5 aa, Artificial Sequence
  Description of Artificial Sequence: Synthetic peptide
ARGPG

SEQ ID NO: 5363 - protein, 5 aa, Artificial Sequence
  Description of Artificial Sequence: Synthetic peptide
AKGPG

SEQ ID NO: 5364 - protein, 5 aa, Artificial Sequence
  Description of Artificial Sequence: Synthetic peptide
ARGLG

SEQ ID NO: 5365 - protein, 5 aa, Artificial Sequence
  Description of Artificial Sequence: Synthetic peptide
AKGLG

SEQ ID NO: 5366 - protein, 5 aa, Artificial Sequence
  Description of Artificial Sequence: Synthetic peptide
AREAG

SEQ ID NO: 5367 - protein, 5 aa, Artificial Sequence
  Description of Artificial Sequence: Synthetic peptide
AKEAG

SEQ ID NO: 5368 - protein, 5 aa, Artificial Sequence
  Description of Artificial Sequence: Synthetic peptide
ARDAG

SEQ ID NO: 5369 - protein, 5 aa, Artificial Sequence
  Description of Artificial Sequence: Synthetic peptide
AKDAG

SEQ ID NO: 5370 - protein, 5 aa, Artificial Sequence
  Description of Artificial Sequence: Synthetic peptide
ARGAG

SEQ ID NO: 5371 - protein, 5 aa, Artificial Sequence
  Description of Artificial Sequence: Synthetic peptide
AKGAG

SEQ ID NO: 5372 - protein, 4 aa, Artificial Sequence
  Description of Artificial Sequence: Synthetic peptide
ARTG

SEQ ID NO: 5373 - protein, 4 aa, Artificial Sequence
  Description of Artificial Sequence: Synthetic peptide
AKTG

SEQ ID NO: 5374 - protein, 5 aa, Artificial Sequence
  Description of Artificial Sequence: Synthetic peptide
ARDTG

SEQ ID NO: 5375 - protein, 5 aa, Artificial Sequence
  Description of Artificial Sequence: Synthetic peptide
AKDTG

SEQ ID NO: 5376 - protein, 5 aa, Artificial Sequence
  Description of Artificial Sequence: Synthetic peptide
AREVG

SEQ ID NO: 5377 - protein, 5 aa, Artificial Sequence
  Description of Artificial Sequence: Synthetic peptide
AKEVG

SEQ ID NO: 5378 - protein, 5 aa, Artificial Sequence
  Description of Artificial Sequence: Synthetic peptide
ARDVG

SEQ ID NO: 5379 - protein, 5 aa, Artificial Sequence
  Description of Artificial Sequence: Synthetic peptide
AKDVG

SEQ ID NO: 5380 - protein, 5 aa, Artificial Sequence
  Description of Artificial Sequence: Synthetic peptide
ARDPR

SEQ ID NO: 5381 - protein, 5 aa, Artificial Sequence
  Description of Artificial Sequence: Synthetic peptide
AKDPR

SEQ ID NO: 5382 - protein, 4 aa, Artificial Sequence
  Description of Artificial Sequence: Synthetic peptide
ARPP

SEQ ID NO: 5383 - protein, 4 aa, Artificial Sequence
  Description of Artificial Sequence: Synthetic peptide
AKPP

SEQ ID NO: 5384 - protein, 5 aa, Artificial Sequence
  Description of Artificial Sequence: Synthetic peptide
ARGPL

SEQ ID NO: 5385 - protein, 5 aa, Artificial Sequence
  Description of Artificial Sequence: Synthetic peptide
AKGPL

SEQ ID NO: 5386 - protein, 4 aa, Artificial Sequence
  Description of Artificial Sequence: Synthetic peptide
ARPA

SEQ ID NO: 5387 - protein, 4 aa, Artificial Sequence
  Description of Artificial Sequence: Synthetic peptide
AKPA

SEQ ID NO: 5388 - protein, 5 aa, Artificial Sequence
  Description of Artificial Sequence: Synthetic peptide
ARDPA

SEQ ID NO: 5389 - protein, 5 aa, Artificial Sequence
  Description of Artificial Sequence: Synthetic peptide
AKDPA

SEQ ID NO: 5390 - protein, 4 aa, Artificial Sequence
  Description of Artificial Sequence: Synthetic peptide
ARPT

SEQ ID NO: 5391 - protein, 4 aa, Artificial Sequence
  Description of Artificial Sequence: Synthetic peptide
AKPT

SEQ ID NO: 5392 - protein, 5 aa, Artificial Sequence
  Description of Artificial Sequence: Synthetic peptide
ARDPT

SEQ ID NO: 5393 - protein, 5 aa, Artificial Sequence
  Description of Artificial Sequence: Synthetic peptide
AKDPT

SEQ ID NO: 5394 - protein, 5 aa, Artificial Sequence
  Description of Artificial Sequence: Synthetic peptide
ARGPT

SEQ ID NO: 5395 - protein, 5 aa, Artificial Sequence
  Description of Artificial Sequence: Synthetic peptide
AKGPT

SEQ ID NO: 5396 - protein, 4 aa, Artificial Sequence
  Description of Artificial Sequence: Synthetic peptide
ARPV

SEQ ID NO: 5397 - protein, 4 aa, Artificial Sequence
  Description of Artificial Sequence: Synthetic peptide
AKPV

SEQ ID NO: 5398 - protein, 5 aa, Artificial Sequence
  Description of Artificial Sequence: Synthetic peptide
ARDPV

SEQ ID NO: 5399 - protein, 5 aa, Artificial Sequence
  Description of Artificial Sequence: Synthetic peptide
AKDPV

SEQ ID NO: 5400 - protein, 5 aa, Artificial Sequence
  Description of Artificial Sequence: Synthetic peptide
ARGRP

SEQ ID NO: 5401 - protein, 5 aa, Artificial Sequence
  Description of Artificial Sequence: Synthetic peptide
AKGRP

SEQ ID NO: 5402 - protein, 5 aa, Artificial Sequence
  Description of Artificial Sequence: Synthetic peptide
ARDSP

SEQ ID NO: 5403 - protein, 5 aa, Artificial Sequence
  Description of Artificial Sequence: Synthetic peptide
AKDSP

SEQ ID NO: 5404 - protein, 5 aa, Artificial Sequence
  Description of Artificial Sequence: Synthetic peptide
ARGSP

SEQ ID NO: 5405 - protein, 5 aa, Artificial Sequence
  Description of Artificial Sequence: Synthetic peptide
AKGSP

SEQ ID NO: 5406 - protein, 5 aa, Artificial Sequence
  Description of Artificial Sequence: Synthetic peptide
ARDLP

SEQ ID NO: 5407 - protein, 5 aa, Artificial Sequence
  Description of Artificial Sequence: Synthetic peptide
AKDLP

SEQ ID NO: 5408 - protein, 5 aa, Artificial Sequence
  Description of Artificial Sequence: Synthetic peptide
ARDAP

SEQ ID NO: 5409 - protein, 5 aa, Artificial Sequence
  Description of Artificial Sequence: Synthetic peptide
AKDAP

SEQ ID NO: 5410 - protein, 5 aa, Artificial Sequence
  Description of Artificial Sequence: Synthetic peptide
ARGAP

SEQ ID NO: 5411 - protein, 5 aa, Artificial Sequence
  Description of Artificial Sequence: Synthetic peptide
AKGAP

SEQ ID NO: 5412 - protein, 5 aa, Artificial Sequence
  Description of Artificial Sequence: Synthetic peptide
ARDTP

SEQ ID NO: 5413 - protein, 5 aa, Artificial Sequence
  Description of Artificial Sequence: Synthetic peptide
AKDTP

SEQ ID NO: 5414 - protein, 5 aa, Artificial Sequence
  Description of Artificial Sequence: Synthetic peptide
ARAGG

SEQ ID NO: 5415 - protein, 5 aa, Artificial Sequence
  Description of Artificial Sequence: Synthetic peptide
AKAGG

SEQ ID NO: 5416 - protein, 6 aa, Artificial Sequence
  Description of Artificial Sequence: Synthetic peptide
ARDGGG

SEQ ID NO: 5417 - protein, 6 aa, Artificial Sequence
  Description of Artificial Sequence: Synthetic peptide
AKDGGG

SEQ ID NO: 5418 - protein, 5 aa, Artificial Sequence
  Description of Artificial Sequence: Synthetic peptide
ARLGG

SEQ ID NO: 5419 - protein, 5 aa, Artificial Sequence
  Description of Artificial Sequence: Synthetic peptide
AKLGG

SEQ ID NO: 5420 - protein, 6 aa, Artificial Sequence
  Description of Artificial Sequence: Synthetic peptide
ARDLGG

SEQ ID NO: 5421 - protein, 6 aa, Artificial Sequence
  Description of Artificial Sequence: Synthetic peptide
AKDLGG

SEQ ID NO: 5422 - protein, 5 aa, Artificial Sequence
  Description of Artificial Sequence: Synthetic peptide
ARRGG

SEQ ID NO: 5423 - protein, 5 aa, Artificial Sequence
  Description of Artificial Sequence: Synthetic peptide
AKRGG

SEQ ID NO: 5424 - protein, 6 aa, Artificial Sequence
  Description of Artificial Sequence: Synthetic peptide
ARDRGG

SEQ ID NO: 5425 - protein, 6 aa, Artificial Sequence
  Description of Artificial Sequence: Synthetic peptide
AKDRGG

SEQ ID NO: 5426 - protein, 5 aa, Artificial Sequence
  Description of Artificial Sequence: Synthetic peptide
ARSGG

SEQ ID NO: 5427 - protein, 5 aa, Artificial Sequence
  Description of Artificial Sequence: Synthetic peptide
AKSGG

SEQ ID NO: 5428 - DNA, 12 bp, Artificial Sequence
  Description of Artificial Sequence: Synthetic oligonucleotide
gccagagagcct

SEQ ID NO: 5429 - DNA, 12 bp, Artificial Sequence
  Description of Artificial Sequence: Synthetic oligonucleotide
gccaaggagcct

SEQ ID NO: 5430 - DNA, 12 bp, Artificial Sequence
  Description of Artificial Sequence: Synthetic oligonucleotide
gccagagagttg

SEQ ID NO: 5431 - DNA, 12 bp, Artificial Sequence
  Description of Artificial Sequence: Synthetic oligonucleotide
gccaaggaattg

SEQ ID NO: 5432 - DNA, 15 bp, Artificial Sequence
  Description of Artificial Sequence: Synthetic oligonucleotide
gccagagaagggaga

SEQ ID NO: 5433 - DNA, 15 bp, Artificial Sequence
  Description of Artificial Sequence: Synthetic oligonucleotide
gccaaggaaggcaga

SEQ ID NO: 5434 - DNA, 15 bp, Artificial Sequence
  Description of Artificial Sequence: Synthetic oligonucleotide
gccagaggaggtaga

SEQ ID NO: 5435 - DNA, 15 bp, Artificial Sequence
  Description of Artificial Sequence: Synthetic oligonucleotide
gccaagggaggtaga

SEQ ID NO: 5436 - DNA, 15 bp, Artificial Sequence
  Description of Artificial Sequence: Synthetic oligonucleotide
gccagagaaggatct

SEQ ID NO: 5437 - DNA, 15 bp, Artificial Sequence
  Description of Artificial Sequence: Synthetic oligonucleotide
gccaaggaaggatct

SEQ ID NO: 5438 - DNA, 15 bp, Artificial Sequence
  Description of Artificial Sequence: Synthetic oligonucleotide
gccagagacggatct

SEQ ID NO: 5439 - DNA, 15 bp, Artificial Sequence
  Description of Artificial Sequence: Synthetic oligonucleotide
gccaaggatggttct

SEQ ID NO: 5440 - DNA, 15 bp, Artificial Sequence
  Description of Artificial Sequence: Synthetic oligonucleotide
gccagagaaggtcct

SEQ ID NO: 5441 - DNA, 15 bp, Artificial Sequence
  Description of Artificial Sequence: Synthetic oligonucleotide
gccaaggaggggcct

SEQ ID NO: 5442 - DNA, 15 bp, Artificial Sequence
  Description of Artificial Sequence: Synthetic oligonucleotide
gccagagacggtcct

SEQ ID NO: 5443 - DNA, 15 bp, Artificial Sequence
  Description of Artificial Sequence: Synthetic oligonucleotide
gccaaggacggtcct

SEQ ID NO: 5444 - DNA, 15 bp, Artificial Sequence
  Description of Artificial Sequence: Synthetic oligonucleotide
gccagagagggcttg

SEQ ID NO: 5445 - DNA, 15 bp, Artificial Sequence
  Description of Artificial Sequence: Synthetic oligonucleotide
gccaaggaagggttg

SEQ ID NO: 5446 - DNA, 15 bp, Artificial Sequence
  Description of Artificial Sequence: Synthetic oligonucleotide
gccagagatgggttg

SEQ ID NO: 5447 - DNA, 15 bp, Artificial Sequence
  Description of Artificial Sequence: Synthetic oligonucleotide
gccaaggacggtttg

SEQ ID NO: 5448 - DNA, 15 bp, Artificial Sequence
  Description of Artificial Sequence: Synthetic oligonucleotide
gccagaggtggattg

SEQ ID NO: 5449 - DNA, 15 bp, Artificial Sequence
  Description of Artificial Sequence: Synthetic oligonucleotide
gccaagggagggttg

SEQ ID NO: 5450 - DNA, 15 bp, Artificial Sequence
  Description of Artificial Sequence: Synthetic oligonucleotide
gccagagaaggagct

SEQ ID NO: 5451 - DNA, 15 bp, Artificial Sequence
  Description of Artificial Sequence: Synthetic oligonucleotide
gccaaggagggagct

SEQ ID NO: 5452 - DNA, 15 bp, Artificial Sequence
  Description of Artificial Sequence: Synthetic oligonucleotide
gccagagatggcgct

SEQ ID NO: 5453 - DNA, 15 bp, Artificial Sequence
  Description of Artificial Sequence: Synthetic oligonucleotide
gccaaggatggagct

SEQ ID NO: 5454 - DNA, 15 bp, Artificial Sequence
  Description of Artificial Sequence: Synthetic oligonucleotide
gccagagatggtgtg

SEQ ID NO: 5455 - DNA, 15 bp, Artificial Sequence
  Description of Artificial Sequence: Synthetic oligonucleotide
gccaaggatggtgtg

SEQ ID NO: 5456 - DNA, 15 bp, Artificial Sequence
  Description of Artificial Sequence: Synthetic oligonucleotide
gccagagagtctgga

SEQ ID NO: 5457 - DNA, 15 bp, Artificial Sequence
  Description of Artificial Sequence: Synthetic oligonucleotide
gccaaggaaagtgga

SEQ ID NO: 5458 - DNA, 15 bp, Artificial Sequence
  Description of Artificial Sequence: Synthetic oligonucleotide
gccagaggctctgga

SEQ ID NO: 5459 - DNA, 15 bp, Artificial Sequence
  Description of Artificial Sequence: Synthetic oligonucleotide
gccaaggggtctgga

SEQ ID NO: 5460 - DNA, 12 bp, Artificial Sequence
  Description of Artificial Sequence: Synthetic oligonucleotide
gccagaccagga

SEQ ID NO: 5461 - DNA, 12 bp, Artificial Sequence
  Description of Artificial Sequence: Synthetic oligonucleotide
gccaagcccgga

SEQ ID NO: 5462 - DNA, 15 bp, Artificial Sequence
  Description of Artificial Sequence: Synthetic oligonucleotide
gccagaggacctgga

SEQ ID NO: 5463 - DNA, 15 bp, Artificial Sequence
  Description of Artificial Sequence: Synthetic oligonucleotide
gccaaggggcctgga

SEQ ID NO: 5464 - DNA, 15 bp, Artificial Sequence
  Description of Artificial Sequence: Synthetic oligonucleotide
gccagaggactagga

SEQ ID NO: 5465 - DNA, 15 bp, Artificial Sequence
  Description of Artificial Sequence: Synthetic oligonucleotide
gccaagggtttggga

SEQ ID NO: 5466 - DNA, 15 bp, Artificial Sequence
  Description of Artificial Sequence: Synthetic oligonucleotide
gccagagaagccgga

SEQ ID NO: 5467 - DNA, 15 bp, Artificial Sequence
  Description of Artificial Sequence: Synthetic oligonucleotide
gccaaggaggctgga

SEQ ID NO: 5468 - DNA, 15 bp, Artificial Sequence
  Description of Artificial Sequence: Synthetic oligonucleotide
gccagagacgcagga

SEQ ID NO: 5469 - DNA, 15 bp, Artificial Sequence
  Description of Artificial Sequence: Synthetic oligonucleotide
gccaaggatgccgga

SEQ ID NO: 5470 - DNA, 15 bp, Artificial Sequence
  Description of Artificial Sequence: Synthetic oligonucleotide
gccagaggtgccgga

SEQ ID NO: 5471 - DNA, 15 bp, Artificial Sequence
  Description of Artificial Sequence: Synthetic oligonucleotide
gccaagggagcagga

SEQ ID NO: 5472 - DNA, 12 bp, Artificial Sequence
  Description of Artificial Sequence: Synthetic oligonucleotide
gccagaactgga

SEQ ID NO: 5473 - DNA, 12 bp, Artificial Sequence
  Description of Artificial Sequence: Synthetic oligonucleotide
gccaagaccgga

SEQ ID NO: 5474 - DNA, 15 bp, Artificial Sequence
  Description of Artificial Sequence: Synthetic oligonucleotide
gccagagacacggga

SEQ ID NO: 5475 - DNA, 15 bp, Artificial Sequence
  Description of Artificial Sequence: Synthetic oligonucleotide
gccaaggatacggga

SEQ ID NO: 5476 - DNA, 15 bp, Artificial Sequence
  Description of Artificial Sequence: Synthetic oligonucleotide
gccagagaagtcgga

SEQ ID NO: 5477 - DNA, 15 bp, Artificial Sequence
  Description of Artificial Sequence: Synthetic oligonucleotide
gccaaggaggtagga

SEQ ID NO: 5478 - DNA, 15 bp, Artificial Sequence
  Description of Artificial Sequence: Synthetic oligonucleotide
gccagagatgtagga

SEQ ID NO: 5479 - DNA, 15 bp, Artificial Sequence
  Description of Artificial Sequence: Synthetic oligonucleotide
gccaaggacgtagga

SEQ ID NO: 5480 - DNA, 15 bp, Artificial Sequence
  Description of Artificial Sequence: Synthetic oligonucleotide
gccagagatccaaga

SEQ ID NO: 5481 - DNA, 15 bp, Artificial Sequence
  Description of Artificial Sequence: Synthetic oligonucleotide
gccaaggatcctaga

SEQ ID NO: 5482 - DNA, 12 bp, Artificial Sequence
  Description of Artificial Sequence: Synthetic oligonucleotide
gccagaccacct

SEQ ID NO: 5483 - DNA, 12 bp, Artificial Sequence
  Description of Artificial Sequence: Synthetic oligonucleotide
gccaagccacct

SEQ ID NO: 5484 - DNA, 15 bp, Artificial Sequence
  Description of Artificial Sequence: Synthetic oligonucleotide
gccagaggtcccttg

SEQ ID NO: 5485 - DNA, 15 bp, Artificial Sequence
  Description of Artificial Sequence: Synthetic oligonucleotide
gccaaggggccgttg

SEQ ID NO: 5486 - DNA, 12 bp, Artificial Sequence
  Description of Artificial Sequence: Synthetic oligonucleotide
gccagaccagct

SEQ ID NO: 5487 - DNA, 12 bp, Artificial Sequence
  Description of Artificial Sequence: Synthetic oligonucleotide
gccaagccggct

SEQ ID NO: 5488 - DNA, 15 bp, Artificial Sequence
  Description of Artificial Sequence: Synthetic oligonucleotide
gccagagatcccgct

SEQ ID NO: 5489 - DNA, 15 bp, Artificial Sequence
  Description of Artificial Sequence: Synthetic oligonucleotide
gccaaggaccccgct

SEQ ID NO: 5490 - DNA, 12 bp, Artificial Sequence
  Description of Artificial Sequence: Synthetic oligonucleotide
gccagacctact

SEQ ID NO: 5491 - DNA, 12 bp, Artificial Sequence
  Description of Artificial Sequence: Synthetic oligonucleotide
gccaagcctact

SEQ ID NO: 5492 - DNA, 15 bp, Artificial Sequence
  Description of Artificial Sequence: Synthetic oligonucleotide
gccagagatccgact

SEQ ID NO: 5493 - DNA, 15 bp, Artificial Sequence
  Description of Artificial Sequence: Synthetic oligonucleotide
gccaaggaccctact

SEQ ID NO: 5494 - DNA, 15 bp, Artificial Sequence
  Description of Artificial Sequence: Synthetic oligonucleotide
gccagaggacccact

SEQ ID NO: 5495 - DNA, 15 bp, Artificial Sequence
  Description of Artificial Sequence: Synthetic oligonucleotide
gccaaggggcccact

SEQ ID NO: 5496 - DNA, 12 bp, Artificial Sequence
  Description of Artificial Sequence: Synthetic oligonucleotide
gccagaccggtg

SEQ ID NO: 5497 - DNA, 12 bp, Artificial Sequence
  Description of Artificial Sequence: Synthetic oligonucleotide
gccaagccagtg

SEQ ID NO: 5498 - DNA, 15 bp, Artificial Sequence
  Description of Artificial Sequence: Synthetic oligonucleotide
gccagagatccggtg

SEQ ID NO: 5499 - DNA, 15 bp, Artificial Sequence
  Description of Artificial Sequence: Synthetic oligonucleotide
gccaaggaccctgtg

SEQ ID NO: 5500 - DNA, 15 bp, Artificial Sequence
  Description of Artificial Sequence: Synthetic oligonucleotide
gccagaggaaggcct

SEQ ID NO: 5501 - DNA, 15 bp, Artificial Sequence
  Description of Artificial Sequence: Synthetic oligonucleotide
gccaagggccgtcct

SEQ ID NO: 5502 - DNA, 15 bp, Artificial Sequence
  Description of Artificial Sequence: Synthetic oligonucleotide
gccagagactctcct

SEQ ID NO: 5503 - DNA, 15 bp, Artificial Sequence
  Description of Artificial Sequence: Synthetic oligonucleotide
gccaaggactcccct

SEQ ID NO: 5504 - DNA, 15 bp, Artificial Sequence
  Description of Artificial Sequence: Synthetic oligonucleotide
gccagaggttcccct

SEQ ID NO: 5505 - DNA, 15 bp, Artificial Sequence
  Description of Artificial Sequence: Synthetic oligonucleotide
gccaagggttcacct

SEQ ID NO: 5506 - DNA, 15 bp, Artificial Sequence
  Description of Artificial Sequence: Synthetic oligonucleotide
gccagagatcttcct

SEQ ID NO: 5507 - DNA, 15 bp, Artificial Sequence
  Description of Artificial Sequence: Synthetic oligonucleotide
gccaaggatctacct

SEQ ID NO: 5508 - DNA, 15 bp, Artificial Sequence
  Description of Artificial Sequence: Synthetic oligonucleotide
gccagagatgctcct

SEQ ID NO: 5509 - DNA, 15 bp, Artificial Sequence
  Description of Artificial Sequence: Synthetic oligonucleotide
gccaaggatgctcct

SEQ ID NO: 5510 - DNA, 15 bp, Artificial Sequence
  Description of Artificial Sequence: Synthetic oligonucleotide
gccagaggggcccct

SEQ ID NO: 5511 - DNA, 15 bp, Artificial Sequence
  Description of Artificial Sequence: Synthetic oligonucleotide
gccaagggtgcccct

SEQ ID NO: 5512 - DNA, 15 bp, Artificial Sequence
  Description of Artificial Sequence: Synthetic oligonucleotide
gccagagatacccct

SEQ ID NO: 5513 - DNA, 15 bp, Artificial Sequence
  Description of Artificial Sequence: Synthetic oligonucleotide
gccaaggacacgcct

SEQ ID NO: 5514 - DNA, 15 bp, Artificial Sequence
  Description of Artificial Sequence: Synthetic oligonucleotide
gccagagctggcgga

SEQ ID NO: 5515 - DNA, 15 bp, Artificial Sequence
  Description of Artificial Sequence: Synthetic oligonucleotide
gccaaggccggtgga

SEQ ID NO: 5516 - DNA, 18 bp, Artificial Sequence
  Description of Artificial Sequence: Synthetic oligonucleotide
gccagagatggtggcgga

SEQ ID NO: 5517 - DNA, 18 bp, Artificial Sequence
  Description of Artificial Sequence: Synthetic oligonucleotide
gccaaggacggcggtgga

SEQ ID NO: 5518 - DNA, 15 bp, Artificial Sequence
  Description of Artificial Sequence: Synthetic oligonucleotide
gccagattgggcgga

SEQ ID NO: 5519 - DNA, 15 bp, Artificial Sequence
  Description of Artificial Sequence: Synthetic oligonucleotide
gccaagctaggcgga

SEQ ID NO: 5520 - DNA, 18 bp, Artificial Sequence
  Description of Artificial Sequence: Synthetic oligonucleotide
gccagagatttgggtgga

SEQ ID NO: 5521 - DNA, 18 bp, Artificial Sequence
  Description of Artificial Sequence: Synthetic oligonucleotide
gccaaggatttgggtgga

SEQ ID NO: 5522 - DNA, 15 bp, Artificial Sequence
  Description of Artificial Sequence: Synthetic oligonucleotide
gccagaagaggtgga

SEQ ID NO: 5523 - DNA, 15 bp, Artificial Sequence
  Description of Artificial Sequence: Synthetic oligonucleotide
gccaagagaggagga

SEQ ID NO: 5524 - DNA, 18 bp, Artificial Sequence
  Description of Artificial Sequence: Synthetic oligonucleotide
gccagagaccgtggcgga

SEQ ID NO: 5525 - DNA, 18 bp, Artificial Sequence
  Description of Artificial Sequence: Synthetic oligonucleotide
gccaaggacagaggtgga

SEQ ID NO: 5526 - DNA, 15 bp, Artificial Sequence
  Description of Artificial Sequence: Synthetic oligonucleotide
gccagatcaggcgga

SEQ ID NO: 5527 - DNA, 15 bp, Artificial Sequence
  Description of Artificial Sequence: Synthetic oligonucleotide
gccaagtccggtgga

SEQ ID NO: 5528 - DNA, 12 bp, Artificial Sequence
  Description of Artificial Sequence: Synthetic oligonucleotide
bhcacagccaks

SEQ ID NO: 5529 - DNA, 12 bp, Artificial Sequence
  Description of Artificial Sequence: Synthetic oligonucleotide
vhggbagcaact

SEQ ID NO: 5530 - DNA, 12 bp, Artificial Sequence
  Description of Artificial Sequence: Synthetic oligonucleotide
  modified_base (11)..(11): a, c, t or g
dbgttcggagng

SEQ ID NO: 5531 - DNA, 12 bp, Artificial Sequence
  Description of Artificial Sequence: Synthetic oligonucleotide
bhcggakmctat

SEQ ID NO: 5532 - DNA, 12 bp, Artificial Sequence
  Description of Artificial Sequence: Synthetic oligonucleotide
tacagcagcvbt

SEQ ID NO: 5533 - DNA, 12 bp, Artificial Sequence
  Description of Artificial Sequence: Synthetic oligonucleotide
vhggtarsaggt

SEQ ID NO: 5534 - DNA, 12 bp, Artificial Sequence
  Description of Artificial Sequence: Synthetic oligonucleotide
vbcgacggatht

SEQ ID NO: 5535 - DNA, 12 bp, Artificial Sequence
  Description of Artificial Sequence: Synthetic oligonucleotide
  modified_base (1)..(1): a, c, t or g
nhctacggagvt

SEQ ID NO: 5536 - DNA, 12 bp, Artificial Sequence
  Description of Artificial Sequence: Synthetic oligonucleotide
vhgryggcaact

SEQ ID NO: 5537 - DNA, 12 bp, Artificial Sequence
  Description of Artificial Sequence: Synthetic oligonucleotide
vhatacagcrst

SEQ ID NO: 5538 - DNA, 12 bp, Artificial Sequence
  Description of Artificial Sequence: Synthetic oligonucleotide
cagtggctabht

SEQ ID NO: 5539 - DNA, 12 bp, Artificial Sequence
  Description of Artificial Sequence: Synthetic oligonucleotide
  modified_base (11)..(11): a, c, t or g
vhagtagcagnt

SEQ ID NO: 5540 - DNA, 12 bp, Artificial Sequence
  Description of Artificial Sequence: Synthetic oligonucleotide
vbcacagtarmg

SEQ ID NO: 5541 - DNA, 12 bp, Artificial Sequence
  Description of Artificial Sequence: Synthetic oligonucleotide
agcagcagcdbg

SEQ ID NO: 5542 - DNA, 12 bp, Artificial Sequence
  Description of Artificial Sequence: Synthetic oligonucleotide
  modified_base (1)..(1): a, c, t or g
nhctmctacggt

SEQ ID NO: 5543 - DNA, 12 bp, Artificial Sequence
  Description of Artificial Sequence: Synthetic oligonucleotide
bhcagctggtht

SEQ ID NO: 5544 - DNA, 12 bp, Artificial Sequence
  Description of Artificial Sequence: Synthetic oligonucleotide
  modified_base (11)..(11): a, c, t or g
vhacaactagnt

SEQ ID NO: 5545 - DNA, 12 bp, Artificial Sequence
  Description of Artificial Sequence: Synthetic oligonucleotide
bhcggaagckmt

SEQ ID NO: 5546 - DNA, 12 bp, Artificial Sequence
  Description of Artificial Sequence: Synthetic oligonucleotide
bhcggatsgtat

SEQ ID NO: 5547 - DNA, 12 bp, Artificial Sequence
  Description of Artificial Sequence: Synthetic oligonucleotide
  modified_base (1)..(1): a, c, t or g
nhcagcggabgg

SEQ ID NO: 5548 - DNA, 12 bp, Artificial Sequence
  Description of Artificial Sequence: Synthetic oligonucleotide
bhcggatackmt

SEQ ID NO: 5549 - DNA, 12 bp, Artificial Sequence
  Description of Artificial Sequence: Synthetic oligonucleotide
vhagtaacarmg

SEQ ID NO: 5550 - DNA, 12 bp, Artificial Sequence
  Description of Artificial Sequence: Synthetic oligonucleotide
gcagcagcavbt

SEQ ID NO: 5551 - DNA, 12 bp, Artificial Sequence
  Description of Artificial Sequence: Synthetic oligonucleotide
vbcayattcggt

SEQ ID NO: 5552 - DNA, 12 bp, Artificial Sequence
  Description of Artificial Sequence: Synthetic oligonucleotide
gtagcagcavha

SEQ ID NO: 5553 - DNA, 12 bp, Artificial Sequence
  Description of Artificial Sequence: Synthetic oligonucleotide
  modified_base (1)..(1): a, c, t or g
nhctactacgvt

SEQ ID NO: 5554 - DNA, 12 bp, Artificial Sequence
  Description of Artificial Sequence: Synthetic oligonucleotide
vbckmcggatat

SEQ ID NO: 5555 - DNA, 12 bp, Artificial Sequence
  Description of Artificial Sequence: Synthetic oligonucleotide
vhacaactakkg

SEQ ID NO: 5556 - DNA, 12 bp, Artificial Sequence
  Description of Artificial Sequence: Synthetic oligonucleotide
vhgggarkcgct

SEQ ID NO: 5557 - DNA, 12 bp, Artificial Sequence
  Description of Artificial Sequence: Synthetic oligonucleotide
vbtbtcggagag

SEQ ID NO: 5558 - DNA, 12 bp, Artificial Sequence
  Description of Artificial Sequence: Synthetic oligonucleotide
bhctacagckmt

SEQ ID NO: 5559 - DNA, 12 bp, Artificial Sequence
  Description of Artificial Sequence: Synthetic oligonucleotide
vhagtassagct

SEQ ID NO: 5560 - DNA, 12 bp, Artificial Sequence
  Description of Artificial Sequence: Synthetic oligonucleotide
vbtcdaggagtt

SEQ ID NO: 5561 - DNA, 12 bp, Artificial Sequence
  Description of Artificial Sequence: Synthetic oligonucleotide
gacagcagcdbg

SEQ ID NO: 5562 - DNA, 12 bp, Artificial Sequence
  Description of Artificial Sequence: Synthetic oligonucleotide
vbcgvctacagt

SEQ ID NO: 5563 - DNA, 12 bp, Artificial Sequence
  Description of Artificial Sequence: Synthetic oligonucleotide
  modified_base (1)..(1): a, c, t or g
nhctacggakct

SEQ ID NO: 5564 - DNA, 12 bp, Artificial Sequence
  Description of Artificial Sequence: Synthetic oligonucleotide
  modified_base (1)..(1): a, c, t or g
nhctactactht

SEQ ID NO: 5565 - DNA, 12 bp, Artificial Sequence
  Description of Artificial Sequence: Synthetic oligonucleotide
bhcvgctacagt

SEQ ID NO: 5566 - DNA, 12 bp, Artificial Sequence
  Description of Artificial Sequence: Synthetic oligonucleotide
vbctggttcggt

SEQ ID NO: 5567 - DNA, 12 bp, Artificial Sequence
  Description of Artificial Sequence: Synthetic oligonucleotide
  modified_base (2)..(2): a, c, t or g
vnctactactht

SEQ ID NO: 5568 - DNA, 12 bp, Artificial Sequence
  Description of Artificial Sequence: Synthetic oligonucleotide
vhabtcggaggt

SEQ ID NO: 5569 - DNA, 15 bp, Artificial Sequence
  Description of Artificial Sequence: Synthetic oligonucleotide
  modified_base (1)..(1): a, c, t or g
nhcatggtaagagvt

SEQ ID NO: 5570 - DNA, 15 bp, Artificial Sequence
  Description of Artificial Sequence: Synthetic oligonucleotide
  modified_base (1)..(1): a, c, t or g
nhctacggagactht

SEQ ID NO: 5571 - DNA, 15 bp, Artificial Sequence
  Description of Artificial Sequence: Synthetic oligonucleotide
  modified_base (14)..(14): a, c, t or g
vbctacagctacgnt

SEQ ID NO: 5572 - DNA, 15 bp, Artificial Sequence
  Description of Artificial Sequence: Synthetic oligonucleotide
  modified_base (2)..(2): a, c, t or g
vncagcggaagctht

SEQ ID NO: 5573 - DNA, 15 bp, Artificial Sequence
  Description of Artificial Sequence: Synthetic oligonucleotide
vbctttctagaatbg

SEQ ID NO: 5574 - DNA, 15 bp, Artificial Sequence
  Description of Artificial Sequence: Synthetic oligonucleotide
bhcggaagctackmt

SEQ ID NO: 5575 - DNA, 15 bp, Artificial Sequence
  Description of Artificial Sequence: Synthetic oligonucleotide
  modified_base (1)..(1): a, c, t or g
nhcagcggaagctht

SEQ ID NO: 5576 - DNA, 15 bp, Artificial Sequence
  Description of Artificial Sequence: Synthetic oligonucleotide
bhcagcagcagctbg

SEQ ID NO: 5577 - DNA, 15 bp, Artificial Sequence
  Description of Artificial Sequence: Synthetic oligonucleotide
bhcagcagcggatbg

SEQ ID NO: 5578 - DNA, 15 bp, Artificial Sequence
  Description of Artificial Sequence: Synthetic oligonucleotide
  modified_base (14)..(14): a, c, t or g
vbcacagtaacaana

SEQ ID NO: 5579 - DNA, 15 bp, Artificial Sequence
  Description of Artificial Sequence: Synthetic oligonucleotide
bhcagcagcagctht

SEQ ID NO: 5580 - DNA, 15 bp, Artificial Sequence
  Description of Artificial Sequence: Synthetic oligonucleotide
  modified_base (1)..(1): a, c, t or g
nhcagcggatggtht

SEQ ID NO: 5581 - DNA, 15 bp, Artificial Sequence
  Description of Artificial Sequence: Synthetic oligonucleotide
  modified_base (1)..(1): a, c, t or g
nhcagcggatacgvt

SEQ ID NO: 5582 - DNA, 15 bp, Artificial Sequence
  Description of Artificial Sequence: Synthetic oligonucleotide
  modified_base (1)..(1): a, c, t or g
nhctactacgacabt

SEQ ID NO: 5583 - DNA, 15 bp, Artificial Sequence
  Description of Artificial Sequence: Synthetic oligonucleotide
bhcagcagcggatht

SEQ ID NO: 5584 - DNA, 15 bp, Artificial Sequence
  Description of Artificial Sequence: Synthetic oligonucleotide
  modified_base (14)..(14): a, c, t or g
vhagcagcaagacnt

SEQ ID NO: 5585 - DNA, 15 bp, Artificial Sequence
  Description of Artificial Sequence: Synthetic oligonucleotide
vhgtactactacgvt

SEQ ID NO: 5586 - DNA, 15 bp, Artificial Sequence
  Description of Artificial Sequence: Synthetic oligonucleotide
vbcacaatggtacrg

SEQ ID NO: 5587 - DNA, 15 bp, Artificial Sequence
  Description of Artificial Sequence: Synthetic oligonucleotide
  modified_base (1)..(1): a, c, t or g
nhcatggtacraggt

SEQ ID NO: 5588 - DNA, 15 bp, Artificial Sequence
  Description of Artificial Sequence: Synthetic oligonucleotide
  modified_base (1)..(1): a, c, t or g
nhctsgggaagctat

SEQ ID NO: 5589 - DNA, 18 bp, Artificial Sequence
  Description of Artificial Sequence: Synthetic oligonucleotide
bhcagcagcagctggtht

SEQ ID NO: 5590 - DNA, 18 bp, Artificial Sequence
  Description of Artificial Sequence: Synthetic oligonucleotide
  modified_base (1)..(1): a, c, t or g
nhctactacgacagcabt

SEQ ID NO: 5591 - DNA, 18 bp, Artificial Sequence
  Description of Artificial Sequence: Synthetic oligonucleotide
  modified_base (17)..(17): a, c, t or g
vbctacagcggatacgnt

SEQ ID NO: 5592 - DNA, 18 bp, Artificial Sequence
  Description of Artificial Sequence: Synthetic oligonucleotide
bhcagcagcggatggtht

SEQ ID NO: 5593 - DNA, 18 bp, Artificial Sequence
  Description of Artificial Sequence: Synthetic oligonucleotide
  modified_base (1)..(1): a, c, t or g
nhctactacggaagcgvt

SEQ ID NO: 5594 - DNA, 18 bp, Artificial Sequence
  Description of Artificial Sequence: Synthetic oligonucleotide
bhcagcagcggatactht

SEQ ID NO: 5595 - DNA, 18 bp, Artificial Sequence
  Description of Artificial Sequence: Synthetic oligonucleotide
  modified_base (1)..(1): a, c, t or g
nhctacgacagcagcgvt

SEQ ID NO: 5596 - DNA, 18 bp, Artificial Sequence
  Description of Artificial Sequence: Synthetic oligonucleotide
  modified_base (1)..(1): a, c, t or g
nhcgacttctggagcgvt

SEQ ID NO: 5597 - DNA, 18 bp, Artificial Sequence
  Description of Artificial Sequence: Synthetic oligonucleotide
bhcgacagcagcggatht

SEQ ID NO: 5598 - DNA, 18 bp, Artificial Sequence
  Description of Artificial Sequence: Synthetic oligonucleotide
  modified_base (2)..(2): a, c, t or g
snatacttcgactggyyt

SEQ ID NO: 5599 - DNA, 18 bp, Artificial Sequence
  Description of Artificial Sequence: Synthetic oligonucleotide
tgtrgcrgcacaagctgt

SEQ ID NO: 5600 - DNA, 18 bp, Artificial Sequence
  Description of Artificial Sequence: Synthetic oligonucleotide
  modified_base (1)..(1): a, c, t or g
nhctactacggaagcgvg

SEQ ID NO: 5601 - DNA, 18 bp, Artificial Sequence
  Description of Artificial Sequence: Synthetic oligonucleotide
tgtrgcrgcggaagctgt

SEQ ID NO: 5602 - DNA, 18 bp, Artificial Sequence
  Description of Artificial Sequence: Synthetic oligonucleotide
  modified_base (1)..(1): a, c, t or g
nhcttttggagcggatht

SEQ ID NO: 5603 - DNA, 21 bp, Artificial Sequence
  Description of Artificial Sequence: Synthetic oligonucleotide
  modified_base (1)..(1): a, c, t or g
nhctactacgacagcagcgvt

SEQ ID NO: 5604 - DNA, 21 bp, Artificial Sequence
  Description of Artificial Sequence: Synthetic oligonucleotide
  modified_base (1)..(1): a, c, t or g
nhcgacatactaacaggatht

SEQ ID NO: 5605 - DNA, 21 bp, Artificial Sequence
  Description of Artificial Sequence: Synthetic oligonucleotide
  modified_base (1)..(1): a, c, t or g
nhctacgacttctggagcgvt

SEQ ID NO: 5606 - DNA, 21 bp, Artificial Sequence
  Description of Artificial Sequence: Synthetic oligonucleotide
bhctgtagcagcacaagctgt

SEQ ID NO: 5607 - DNA, 21 bp, Artificial Sequence
  Description of Artificial Sequence: Synthetic oligonucleotide
dbgtacagcagcagctggtht

SEQ ID NO: 5608 - DNA, 21 bp, Artificial Sequence
  Description of Artificial Sequence: Synthetic oligonucleotide
  modified_base (1)..(1): a, c, t or g
nhctacgacagcagcggatht

SEQ ID NO: 5609 - DNA, 21 bp, Artificial Sequence
  Description of Artificial Sequence: Synthetic oligonucleotide
  modified_base (1)..(1): a, c, t or g
nhctactacggaagcggaabt

SEQ ID NO: 5610 - DNA, 21 bp, Artificial Sequence
  Description of Artificial Sequence: Synthetic oligonucleotide
dbgtacagcagcggatggtht

SEQ ID NO: 5611 - DNA, 21 bp, Artificial Sequence
  Description of Artificial Sequence: Synthetic oligonucleotide
bhctgtagcggaggaagctgt

SEQ ID NO: 5612 - DNA, 21 bp, Artificial Sequence
  Description of Artificial Sequence: Synthetic oligonucleotide
tgtagcggaggaagctgtyht

SEQ ID NO: 5613 - DNA, 21 bp, Artificial Sequence
  Description of Artificial Sequence: Synthetic oligonucleotide
tgtagcagcacaagctgtyht

SEQ ID NO: 5614 - DNA, 21 bp, Artificial Sequence
  Description of Artificial Sequence: Synthetic oligonucleotide
  modified_base (1)..(1): a, c, t or g
nhctgtggaggagactgttht

SEQ ID NO: 5615 - DNA, 21 bp, Artificial Sequence
  Description of Artificial Sequence: Synthetic oligonucleotide
  modified_base (1)..(1): a, c, t or g
nhcgacttctggagcggatht

SEQ ID NO: 5616 - DNA, 21 bp, Artificial Sequence
  Description of Artificial Sequence: Synthetic oligonucleotide
bhcgacagcagcggatactht

SEQ ID NO: 5617 - DNA, 21 bp, Artificial Sequence
  Description of Artificial Sequence: Synthetic oligonucleotide
vhatactgtggaggagactgt

SEQ ID NO: 5618 - DNA, 24 bp, Artificial Sequence
  Description of Artificial Sequence: Synthetic oligonucleotide
  modified_base (1)..(1): a, c, t or g
nhctactacgacagcagcggatht

SEQ ID NO: 5619 - DNA, 24 bp, Artificial Sequence
  Description of Artificial Sequence: Synthetic oligonucleotide
  modified_base (1)..(1): a, c, t or g
nhctactacggaagcggaagctht

SEQ ID NO: 5620 - DNA, 24 bp, Artificial Sequence
  Description of Artificial Sequence: Synthetic oligonucleotide
vbctactgtagcagcacaagctgt

SEQ ID NO: 5621 - DNA, 24 bp, Artificial Sequence
  Description of Artificial Sequence: Synthetic oligonucleotide
vbctactgtagcggaggaagctgt

SEQ ID NO: 5622 - DNA, 24 bp, Artificial Sequence
  Description of Artificial Sequence: Synthetic oligonucleotide
  modified_base (1)..(1): a, c, t or g
nhctacgacttctggagcggatht

SEQ ID NO: 5623 - DNA, 24 bp, Artificial Sequence
  Description of Artificial Sequence: Synthetic oligonucleotide
  modified_base (1)..(1): a, c, t or g
nhcgacatactaacaggatactht

SEQ ID NO: 5624 - DNA, 24 bp, Artificial Sequence
  Description of Artificial Sequence: Synthetic oligonucleotide
bhctgtagcggaggaagctgttht

SEQ ID NO: 5625 - DNA, 24 bp, Artificial Sequence
  Description of Artificial Sequence: Synthetic oligonucleotide
bhctgtagcagcacaagctgttht

SEQ ID NO: 5626 - DNA, 24 bp, Artificial Sequence
  Description of Artificial Sequence: Synthetic oligonucleotide
vhatactgtggaggagactgttht

SEQ ID NO: 5627 - DNA, 24 bp, Artificial Sequence
  Description of Artificial Sequence: Synthetic oligonucleotide
  modified_base (1)..(1): a, c, t or g
nhctacgacagcagcggatactht

SEQ ID NO: 5628 - DNA, 24 bp, Artificial Sequence
  Description of Artificial Sequence: Synthetic oligonucleotide
  modified_base (2)..(2): a, c, t or g
vnctactacggaagcggaagctmt

SEQ ID NO: 5629 - DNA, 24 bp, Artificial Sequence
  Description of Artificial Sequence: Synthetic oligonucleotide
  modified_base (1)..(1): a, c, t or g
nhcgacttctggagcggatactht

SEQ ID NO: 5630 - DNA, 24 bp, Artificial Sequence
  Description of Artificial Sequence: Synthetic oligonucleotide
vhactaagatacttcgactggywt

SEQ ID NO: 5631 - DNA, 27 bp, Artificial Sequence
  Description of Artificial Sequence: Synthetic oligonucleotide
  modified_base (1)..(1): a, c, t or g
nhctactacgacagcagcggatactht

SEQ ID NO: 5632 - DNA, 27 bp, Artificial Sequence
  Description of Artificial Sequence: Synthetic oligonucleotide
vbctactgtagcggaggaagctgttht

SEQ ID NO: 5633 - DNA, 27 bp, Artificial Sequence
  Description of Artificial Sequence: Synthetic oligonucleotide
vbctactgtagcagcacaagctgttht

SEQ ID NO: 5634 - DNA, 27 bp, Artificial Sequence
  Description of Artificial Sequence: Synthetic oligonucleotide
  modified_base (1)..(1): a, c, t or g
nhctacgacttctggagcggatactht

SEQ ID NO: 5635 - DNA, 27 bp, Artificial Sequence
  Description of Artificial Sequence: Synthetic oligonucleotide
bhctgtagcggaggaagctgttactht

SEQ ID NO: 5636 - DNA, 30 bp, Artificial Sequence
  Description of Artificial Sequence: Synthetic oligonucleotide
  modified_base (1)..(1): a, c, t or g
nhctactacgacagcagcggatactactht

SEQ ID NO: 5637 - DNA, 33 bp, Artificial Sequence
  Description of Artificial Sequence: Synthetic oligonucleotide
  modified_base (1)..(1): a, c, t or g
nhctacgactacgtatggggaagctacgcatht

SEQ ID NO: 5638 - DNA, 36 bp, Artificial Sequence
  Description of Artificial Sequence: Synthetic oligonucleotide
  modified_base (1)..(1): a, c, t or g
nhctacgactacgtatggggaagctacgcatacaha

SEQ ID NO: 5639 - protein, 4 aa, Artificial Sequence
  Description of Artificial Sequence: Synthetic peptide
YTAM

SEQ ID NO: 5640 - protein, 4 aa, Artificial Sequence
  Description of Artificial Sequence: Synthetic peptide
HTAI

SEQ ID NO: 5641 - protein, 4 aa, Artificial Sequence
  Description of Artificial Sequence: Synthetic peptide
YTAS

SEQ ID NO: 5642 - protein, 4 aa, Artificial Sequence
  Description of Artificial Sequence: Synthetic peptide
YTAI

SEQ ID NO: 5643 - protein, 4 aa, Artificial Sequence
  Description of Artificial Sequence: Synthetic peptide
YTAR

SEQ ID NO: 5644 - protein, 4 aa, Artificial Sequence
  Description of Artificial Sequence: Synthetic peptide
PTAS

SEQ ID NO: 5645 - protein, 4 aa, Artificial Sequence
  Description of Artificial Sequence: Synthetic peptide
LTAM

SEQ ID NO: 5646 - protein, 4 aa, Artificial Sequence
  Description of Artificial Sequence: Synthetic peptide
DTAI

SEQ ID NO: 5647 - protein, 4 aa, Artificial Sequence
  Description of Artificial Sequence: Synthetic peptide
FTAS

SEQ ID NO: 5648 - protein, 4 aa, Artificial Sequence
  Description of Artificial Sequence: Synthetic peptide
FTAM

SEQ ID NO: 5649 - protein, 4 aa, Artificial Sequence
  Description of Artificial Sequence: Synthetic peptide
LTAS

SEQ ID NO: 5650 - protein, 4 aa, Artificial Sequence
  Description of Artificial Sequence: Synthetic peptide
ATAI

SEQ ID NO: 5651 - protein, 4 aa, Artificial Sequence
  Description of Artificial Sequence: Synthetic peptide
STAI

SEQ ID NO: 5652 - protein, 4 aa, Artificial Sequence
  Description of Artificial Sequence: Synthetic peptide
FTAR

SEQ ID NO: 5653 - protein, 4 aa, Artificial Sequence
  Description of Artificial Sequence: Synthetic peptide
STAR

SEQ ID NO: 5654 - protein, 4 aa, Artificial Sequence
  Description of Artificial Sequence: Synthetic peptide
LTAR

SEQ ID NO: 5655 - protein, 4 aa, Artificial Sequence
  Description of Artificial Sequence: Synthetic peptide
FTAI

SEQ ID NO: 5656 - protein, 4 aa, Artificial Sequence
  Description of Artificial Sequence: Synthetic peptide
LTAI

SEQ ID NO: 5657 - protein, 4 aa, Artificial Sequence
  Description of Artificial Sequence: Synthetic peptide
STAM

SEQ ID NO: 5658 - protein, 4 aa, Artificial Sequence
  Description of Artificial Sequence: Synthetic peptide
ATAM

SEQ ID NO: 5659 - protein, 4 aa, Artificial Sequence
  Description of Artificial Sequence: Synthetic peptide
STAS

SEQ ID NO: 5660 - protein, 4 aa, Artificial Sequence
  Description of Artificial Sequence: Synthetic peptide
ATAR

SEQ ID NO: 5661 - protein, 4 aa, Artificial Sequence
  Description of Artificial Sequence: Synthetic peptide
HTAS

SEQ ID NO: 5662 - protein, 4 aa, Artificial Sequence
  Description of Artificial Sequence: Synthetic peptide
HTAM

SEQ ID NO: 5663 - protein, 4 aa, Artificial Sequence
  Description of Artificial Sequence: Synthetic peptide
DTAR

SEQ ID NO: 5664 - protein, 4 aa, Artificial Sequence
  Description of Artificial Sequence: Synthetic peptide
HTAR

SEQ ID NO: 5665 - protein, 4 aa, Artificial Sequence
  Description of Artificial Sequence: Synthetic peptide
ATAS

SEQ ID NO: 5666 - protein, 4 aa, Artificial Sequence
  Description of Artificial Sequence: Synthetic peptide
VTAM

SEQ ID NO: 5667 - protein, 4 aa, Artificial Sequence
  Description of Artificial Sequence: Synthetic peptide
PTAR

SEQ ID NO: 5668 - protein, 4 aa, Artificial Sequence
  Description of Artificial Sequence: Synthetic peptide
DTAS

SEQ ID NO: 5669 - protein, 4 aa, Artificial Sequence
  Description of Artificial Sequence: Synthetic peptide
VTAS

SEQ ID NO: 5670 - protein, 4 aa, Artificial Sequence
  Description of Artificial Sequence: Synthetic peptide
PTAM

SEQ ID NO: 5671 - protein, 4 aa, Artificial Sequence
  Description of Artificial Sequence: Synthetic peptide
VTAR

SEQ ID NO: 5672 - protein, 4 aa, Artificial Sequence
  Description of Artificial Sequence: Synthetic peptide
PTAI

SEQ ID NO: 5673 - protein, 4 aa, Artificial Sequence
  Description of Artificial Sequence: Synthetic peptide
LVAT

SEQ ID NO: 5674 - protein, 4 aa, Artificial Sequence
  Description of Artificial Sequence: Synthetic peptide
LAAT

SEQ ID NO: 5675 - protein, 4 aa, Artificial Sequence
  Description of Artificial Sequence: Synthetic peptide
MVAT

SEQ ID NO: 5676 - protein, 4 aa, Artificial Sequence
  Description of Artificial Sequence: Synthetic peptide
TGAT

SEQ ID NO: 5677 - protein, 4 aa, Artificial Sequence
  Description of Artificial Sequence: Synthetic peptide
AVAT

SEQ ID NO: 5678 - protein, 4 aa, Artificial Sequence
  Description of Artificial Sequence: Synthetic peptide
PAAT

SEQ ID NO: 5679 - protein, 4 aa, Artificial Sequence
  Description of Artificial Sequence: Synthetic peptide
KGAT

SEQ ID NO: 5680 - protein, 4 aa, Artificial Sequence
  Description of Artificial Sequence: Synthetic peptide
EGAT

SEQ ID NO: 5681 - protein, 4 aa, Artificial Sequence
  Description of Artificial Sequence: Synthetic peptide
PVAT

SEQ ID NO: 5682 - protein, 4 aa, Artificial Sequence
  Description of Artificial Sequence: Synthetic peptide
AGAT

SEQ ID NO: 5683 - protein, 4 aa, Artificial Sequence
  Description of Artificial Sequence: Synthetic peptide
QAAT

SEQ ID NO: 5684 - protein, 4 aa, Artificial Sequence
  Description of Artificial Sequence: Synthetic peptide
AAAT

SEQ ID NO: 5685 - protein, 4 aa, Artificial Sequence
  Description of Artificial Sequence: Synthetic peptide
VVAT

SEQ ID NO: 5686 - protein, 4 aa, Artificial Sequence
  Description of Artificial Sequence: Synthetic peptide
TVAT

SEQ ID NO: 5687 - protein, 4 aa, Artificial Sequence
  Description of Artificial Sequence: Synthetic peptide
EVAT

SEQ ID NO: 5688 - protein, 4 aa, Artificial Sequence
  Description of Artificial Sequence: Synthetic peptide
LGAT

SEQ ID NO: 5689 - protein, 4 aa, Artificial Sequence
  Description of Artificial Sequence: Synthetic peptide
KAAT

SEQ ID NO: 5690 - protein, 4 aa, Artificial Sequence
  Description of Artificial Sequence: Synthetic peptide
MGAT

SEQ ID NO: 5691 - protein, 4 aa, Artificial Sequence
  Description of Artificial Sequence: Synthetic peptide
PGAT

SEQ ID NO: 5692 - protein, 4 aa, Artificial Sequence
  Description of Artificial Sequence: Synthetic peptide
QVAT

SEQ ID NO: 5693 - protein, 4 aa, Artificial Sequence
  Description of Artificial Sequence: Synthetic peptide
KVAT

SEQ ID NO: 5694 - protein, 4 aa, Artificial Sequence
  Description of Artificial Sequence: Synthetic peptide
EAAT

SEQ ID NO: 5695 - protein, 4 aa, Artificial Sequence
  Description of Artificial Sequence: Synthetic peptide
TAAT

SEQ ID NO: 5696 - protein, 4 aa, Artificial Sequence
  Description of Artificial Sequence: Synthetic peptide
MAAT

SEQ ID NO: 5697 - protein, 4 aa, Artificial Sequence
  Description of Artificial Sequence: Synthetic peptide
QGAT

SEQ ID NO: 5698 - protein, 4 aa, Artificial Sequence
  Description of Artificial Sequence: Synthetic peptide
RFGA

SEQ ID NO: 5699 - protein, 4 aa, Artificial Sequence
  Description of Artificial Sequence: Synthetic peptide
MFGE

SEQ ID NO: 5700 - protein, 4 aa, Artificial Sequence
  Description of Artificial Sequence: Synthetic peptide
MFGA

SEQ ID NO: 5701 - protein, 4 aa, Artificial Sequence
  Description of Artificial Sequence: Synthetic peptide
VFGG

SEQ ID NO: 5702 - protein, 4 aa, Artificial Sequence
  Description of Artificial Sequence: Synthetic peptide
RFGE

SEQ ID NO: 5703 - protein, 4 aa, Artificial Sequence
  Description of Artificial Sequence: Synthetic peptide
MFGV

SEQ ID NO: 5704 - protein, 4 aa, Artificial Sequence
  Description of Artificial Sequence: Synthetic peptide
VFGA

SEQ ID NO: 5705 - protein, 4 aa, Artificial Sequence
  Description of Artificial Sequence: Synthetic peptide
VFGE

SEQ ID NO: 5706 - protein, 4 aa, Artificial Sequence
  Description of Artificial Sequence: Synthetic peptide
VFGV

SEQ ID NO: 5707 - protein, 4 aa, Artificial Sequence
  Description of Artificial Sequence: Synthetic peptide
MFGG

SEQ ID NO: 5708 - protein, 4 aa, Artificial Sequence
  Description of Artificial Sequence: Synthetic peptide
LFGV

SEQ ID NO: 5709 - protein, 4 aa, Artificial Sequence
  Description of Artificial Sequence: Synthetic peptide
SFGE

SEQ ID NO: 5710 - protein, 4 aa, Artificial Sequence
  Description of Artificial Sequence: Synthetic peptide
SFGA

SEQ ID NO: 5711 - protein, 4 aa, Artificial Sequence
  Description of Artificial Sequence: Synthetic peptide
RFGG

SEQ ID NO: 5712 - protein, 4 aa, Artificial Sequence
  Description of Artificial Sequence: Synthetic peptide
SFGV

SEQ ID NO: 5713 - protein, 4 aa, Artificial Sequence
  Description of Artificial Sequence: Synthetic peptide
LFGA

SEQ ID NO: 5714 - protein, 4 aa, Artificial Sequence
  Description of Artificial Sequence: Synthetic peptide
SFGG

SEQ ID NO: 5715 - protein, 4 aa, Artificial Sequence
  Description of Artificial Sequence: Synthetic peptide
LFGG

SEQ ID NO: 5716 - protein, 4 aa, Artificial Sequence
  Description of Artificial Sequence: Synthetic peptide
LFGE

SEQ ID NO: 5717 - protein, 4 aa, Artificial Sequence
  Description of Artificial Sequence: Synthetic peptide
WFGG

SEQ ID NO: 5718 - protein, 4 aa, Artificial Sequence
  Description of Artificial Sequence: Synthetic peptide
WFGV

SEQ ID NO: 5719 - protein, 4 aa, Artificial Sequence
  Description of Artificial Sequence: Synthetic peptide
WFGA

SEQ ID NO: 5720 - protein, 4 aa, Artificial Sequence
  Description of Artificial Sequence: Synthetic peptide
TFGE

SEQ ID NO: 5721 - protein, 4 aa, Artificial Sequence
  Description of Artificial Sequence: Synthetic peptide
AFGV

SEQ ID NO: 5722 - protein, 4 aa, Artificial Sequence
  Description of Artificial Sequence: Synthetic peptide
AFGA

SEQ ID NO: 5723 - protein, 4 aa, Artificial Sequence
  Description of Artificial Sequence: Synthetic peptide
GFGV

SEQ ID NO: 5724 - protein, 4 aa, Artificial Sequence
  Description of Artificial Sequence: Synthetic peptide
GFGA

SEQ ID NO: 5725 - protein, 4 aa, Artificial Sequence
  Description of Artificial Sequence: Synthetic peptide
GFGG

SEQ ID NO: 5726 - protein, 4 aa, Artificial Sequence
  Description of Artificial Sequence: Synthetic peptide
TFGV

SEQ ID NO: 5727 - protein, 4 aa, Artificial Sequence
  Description of Artificial Sequence: Synthetic peptide
AFGE

SEQ ID NO: 5728 - protein, 4 aa, Artificial Sequence
  Description of Artificial Sequence: Synthetic peptide
TFGA

SEQ ID NO: 5729 - protein, 4 aa, Artificial Sequence
  Description of Artificial Sequence: Synthetic peptide
RFGV

SEQ ID NO: 5730 - protein, 4 aa, Artificial Sequence
  Description of Artificial Sequence: Synthetic peptide
AFGG

SEQ ID NO: 5731 - protein, 4 aa, Artificial Sequence
  Description of Artificial Sequence: Synthetic peptide
GFGE

SEQ ID NO: 5732 - protein, 4 aa, Artificial Sequence
  Description of Artificial Sequence: Synthetic peptide
AGDY

SEQ ID NO: 5733 - protein, 4 aa, Artificial Sequence
  Description of Artificial Sequence: Synthetic peptide
PGYY

SEQ ID NO: 5734 - protein, 4 aa, Artificial Sequence
  Description of Artificial Sequence: Synthetic peptide
VGAY

SEQ ID NO: 5735 - protein, 4 aa, Artificial Sequence
  Description of Artificial Sequence: Synthetic peptide
HGSY

SEQ ID NO: 5736 - protein, 4 aa, Artificial Sequence
  Description of Artificial Sequence: Synthetic peptide
PGDY

SEQ ID NO: 5737 - protein, 4 aa, Artificial Sequence
  Description of Artificial Sequence: Synthetic peptide
LGDY

SEQ ID NO: 5738 - protein, 4 aa, Artificial Sequence
  Description of Artificial Sequence: Synthetic peptide
DGAY

SEQ ID NO: 5739 - protein, 4 aa, Artificial Sequence
  Description of Artificial Sequence: Synthetic peptide
FGDY

SEQ ID NO: 5740 - protein, 4 aa, Artificial Sequence
  Description of Artificial Sequence: Synthetic peptide
LGAY

SEQ ID NO: 5741 - protein, 4 aa, Artificial Sequence
  Description of Artificial Sequence: Synthetic peptide
DGYY

SEQ ID NO: 5742 - protein, 4 aa, Artificial Sequence
  Description of Artificial Sequence: Synthetic peptide
VGSY

SEQ ID NO: 5743 - protein, 4 aa, Artificial Sequence
  Description of Artificial Sequence: Synthetic peptide
YGAY

SEQ ID NO: 5744 - protein, 4 aa, Artificial Sequence
  Description of Artificial Sequence: Synthetic peptide
FGYY

SEQ ID NO: 5745 - protein, 4 aa, Artificial Sequence
  Description of Artificial Sequence: Synthetic peptide
DGDY

SEQ ID NO: 5746 - protein, 4 aa, Artificial Sequence
  Description of Artificial Sequence: Synthetic peptide
AGYY

SEQ ID NO: 5747 - protein, 4 aa, Artificial Sequence
  Description of Artificial Sequence: Synthetic peptide
YGSY

SEQ ID NO: 5748 - protein, 4 aa, Artificial Sequence
  Description of Artificial Sequence: Synthetic peptide
VGYY

SEQ ID NO: 5749 - protein, 4 aa, Artificial Sequence
  Description of Artificial Sequence: Synthetic peptide
AGAY

SEQ ID NO: 5750 - protein, 4 aa, Artificial Sequence
  Description of Artificial Sequence: Synthetic peptide
DGSY

SEQ ID NO: 5751 - protein, 4 aa, Artificial Sequence
  Description of Artificial Sequence: Synthetic peptide
HGDY

SEQ ID NO: 5752 - protein, 4 aa, Artificial Sequence
  Description of Artificial Sequence: Synthetic peptide
FGAY

SEQ ID NO: 5753 - protein, 4 aa, Artificial Sequence
  Description of Artificial Sequence: Synthetic peptide
HGYY

SEQ ID NO: 5754 - protein, 4 aa, Artificial Sequence
  Description of Artificial Sequence: Synthetic peptide
YGYY

SEQ ID NO: 5755 - protein, 4 aa, Artificial Sequence
  Description of Artificial Sequence: Synthetic peptide
SGAY

SEQ ID NO: 5756 - protein, 4 aa, Artificial Sequence
  Description of Artificial Sequence: Synthetic peptide
AGSY

SEQ ID NO: 5757 - protein, 4 aa, Artificial Sequence
  Description of Artificial Sequence: Synthetic peptide
HGAY

SEQ ID NO: 5758 - protein, 4 aa, Artificial Sequence
  Description of Artificial Sequence: Synthetic peptide
PGAY

SEQ ID NO: 5759 - protein, 4 aa, Artificial Sequence
  Description of Artificial Sequence: Synthetic peptide
PGSY

SEQ ID NO: 5760 - protein, 4 aa, Artificial Sequence
  Description of Artificial Sequence: Synthetic peptide
LGSY

SEQ ID NO: 5761 - protein, 4 aa, Artificial Sequence
  Description of Artificial Sequence: Synthetic peptide
VGDY

SEQ ID NO: 5762 - protein, 4 aa, Artificial Sequence
  Description of Artificial Sequence: Synthetic peptide
SGDY

SEQ ID NO: 5763 - protein, 4 aa, Artificial Sequence
  Description of Artificial Sequence: Synthetic peptide
LGYY

SEQ ID NO: 5764 - protein, 4 aa, Artificial Sequence
  Description of Artificial Sequence: Synthetic peptide
FGSY

SEQ ID NO: 5765 - protein, 4 aa, Artificial Sequence
  Description of Artificial Sequence: Synthetic peptide
YSSV

SEQ ID NO: 5766 - protein, 4 aa, Artificial Sequence
  Description of Artificial Sequence: Synthetic peptide
YSSI

SEQ ID NO: 5767 - protein, 4 aa, Artificial Sequence
  Description of Artificial Sequence: Synthetic peptide
YSSR

SEQ ID NO: 5768 - protein, 4 aa, Artificial Sequence
  Description of Artificial Sequence: Synthetic peptide
YSSP

SEQ ID NO: 5769 - protein, 4 aa, Artificial Sequence
  Description of Artificial Sequence: Synthetic peptide
YSSA

SEQ ID NO: 5770 - protein, 4 aa, Artificial Sequence
  Description of Artificial Sequence: Synthetic peptide
YSSL

SEQ ID NO: 5771 - protein, 4 aa, Artificial Sequence
  Description of Artificial Sequence: Synthetic peptide
YSST

SEQ ID NO: 5772 - protein, 4 aa, Artificial Sequence
  Description of Artificial Sequence: Synthetic peptide
EVRG

SEQ ID NO: 5773 - protein, 4 aa, Artificial Sequence
  Description of Artificial Sequence: Synthetic peptide
PVRG

SEQ ID NO: 5774 - protein, 4 aa, Artificial Sequence
  Description of Artificial Sequence: Synthetic peptide
PVTG

SEQ ID NO: 5775 - protein, 4 aa, Artificial Sequence
  Description of Artificial Sequence: Synthetic peptide
EVAG

SEQ ID NO: 5776 - protein, 4 aa, Artificial Sequence
  Description of Artificial Sequence: Synthetic peptide
MVTG

SEQ ID NO: 5777 - protein, 4 aa, Artificial Sequence
  Description of Artificial Sequence: Synthetic peptide
MVGG

SEQ ID NO: 5778 - protein, 4 aa, Artificial Sequence
  Description of Artificial Sequence: Synthetic peptide
QVRG

SEQ ID NO: 5779 - protein, 4 aa, Artificial Sequence
  Description of Artificial Sequence: Synthetic peptide
QVGG

SEQ ID NO: 5780 - protein, 4 aa, Artificial Sequence
  Description of Artificial Sequence: Synthetic peptide
VVAG

SEQ ID NO: 5781 - protein, 4 aa, Artificial Sequence
  Description of Artificial Sequence: Synthetic peptide
EVTG

SEQ ID NO: 5782 - protein, 4 aa, Artificial Sequence
  Description of Artificial Sequence: Synthetic peptide
VVRG

SEQ ID NO: 5783 - protein, 4 aa, Artificial Sequence
  Description of Artificial Sequence: Synthetic peptide
PVAG

SEQ ID NO: 5784 - protein, 4 aa, Artificial Sequence
  Description of Artificial Sequence: Synthetic peptide
LVAG

SEQ ID NO: 5785 - protein, 4 aa, Artificial Sequence
  Description of Artificial Sequence: Synthetic peptide
LVRG

SEQ ID NO: 5786 - protein, 4 aa, Artificial Sequence
  Description of Artificial Sequence: Synthetic peptide
QVTG

SEQ ID NO: 5787 - protein, 4 aa, Artificial Sequence
  Description of Artificial Sequence: Synthetic peptide
PVGG

SEQ ID NO: 5788 - protein, 4 aa, Artificial Sequence
  Description of Artificial Sequence: Synthetic peptide
AVGG

SEQ ID NO: 5789 - protein, 4 aa, Artificial Sequence
  Description of Artificial Sequence: Synthetic peptide
TVGG

SEQ ID NO: 5790 - protein, 4 aa, Artificial Sequence
  Description of Artificial Sequence: Synthetic peptide
KVGG

SEQ ID NO: 5791 - protein, 4 aa, Artificial Sequence
  Description of Artificial Sequence: Synthetic peptide
TVAG

SEQ ID NO: 5792 - protein, 4 aa, Artificial Sequence
  Description of Artificial Sequence: Synthetic peptide
AVTG

SEQ ID NO: 5793 - protein, 4 aa, Artificial Sequence
  Description of Artificial Sequence: Synthetic peptide
KVRG

SEQ ID NO: 5794 - protein, 4 aa, Artificial Sequence
  Description of Artificial Sequence: Synthetic peptide
LVTG

SEQ ID NO: 5795 - protein, 4 aa, Artificial Sequence
  Description of Artificial Sequence: Synthetic peptide
AVRG

SEQ ID NO: 5796 - protein, 4 aa, Artificial Sequence
  Description of Artificial Sequence: Synthetic peptide
LVGG

SEQ ID NO: 5797 - protein, 4 aa, Artificial Sequence
  Description of Artificial Sequence: Synthetic peptide
QVAG

SEQ ID NO: 5798 - protein, 4 aa, Artificial Sequence
  Description of Artificial Sequence: Synthetic peptide
KVTG

SEQ ID NO: 5799 - protein, 4 aa, Artificial Sequence
  Description of Artificial Sequence: Synthetic peptide
TVTG

SEQ ID NO: 5800 - protein, 4 aa, Artificial Sequence
  Description of Artificial Sequence: Synthetic peptide
VVGG

SEQ ID NO: 5801 - protein, 4 aa, Artificial Sequence
  Description of Artificial Sequence: Synthetic peptide
KVAG

SEQ ID NO: 5802 - protein, 4 aa, Artificial Sequence
  Description of Artificial Sequence: Synthetic peptide
MVAG

SEQ ID NO: 5803 - protein, 4 aa, Artificial Sequence
  Description of Artificial Sequence: Synthetic peptide
VVTG

SEQ ID NO: 5804 - protein, 4 aa, Artificial Sequence
  Description of Artificial Sequence: Synthetic peptide
TVRG

SEQ ID NO: 5805 - protein, 4 aa, Artificial Sequence
  Description of Artificial Sequence: Synthetic peptide
SDGY

SEQ ID NO: 5806 - protein, 4 aa, Artificial Sequence
  Description of Artificial Sequence: Synthetic peptide
IDGF

SEQ ID NO: 5807 - protein, 4 aa, Artificial Sequence
  Description of Artificial Sequence: Synthetic peptide
ADGY

SEQ ID NO: 5808 - protein, 4 aa, Artificial Sequence
  Description of Artificial Sequence: Synthetic peptide
ADGS

SEQ ID NO: 5809 - protein, 4 aa, Artificial Sequence
  Description of Artificial Sequence: Synthetic peptide
RDGF

SEQ ID NO: 5810 - protein, 4 aa, Artificial Sequence
  Description of Artificial Sequence: Synthetic peptide
IDGS

SEQ ID NO: 5811 - protein, 4 aa, Artificial Sequence
  Description of Artificial Sequence: Synthetic peptide
GDGS

SEQ ID NO: 5812 - protein, 4 aa, Artificial Sequence
  Description of Artificial Sequence: Synthetic peptide
LDGY

SEQ ID NO: 5813 - protein, 4 aa, Artificial Sequence
  Description of Artificial Sequence: Synthetic peptide
GDGY

SEQ ID NO: 5814 - protein, 4 aa, Artificial Sequence
  Description of Artificial Sequence: Synthetic peptide
IDGY

SEQ ID NO: 5815 - protein, 4 aa, Artificial Sequence
  Description of Artificial Sequence: Synthetic peptide
SDGS

SEQ ID NO: 5816 - protein, 4 aa, Artificial Sequence
  Description of Artificial Sequence: Synthetic peptide
SDGF

SEQ ID NO: 5817 - protein, 4 aa, Artificial Sequence
  Description of Artificial Sequence: Synthetic peptide
VDGF

SEQ ID NO: 5818 - protein, 4 aa, Artificial Sequence
  Description of Artificial Sequence: Synthetic peptide
GDGF

SEQ ID NO: 5819 - protein, 4 aa, Artificial Sequence
  Description of Artificial Sequence: Synthetic peptide
TDGY

SEQ ID NO: 5820 - protein, 4 aa, Artificial Sequence
  Description of Artificial Sequence: Synthetic peptide
VDGY

SEQ ID NO: 5821 - protein, 4 aa, Artificial Sequence
  Description of Artificial Sequence: Synthetic peptide
TDGS

SEQ ID NO: 5822 - protein, 4 aa, Artificial Sequence
  Description of Artificial Sequence: Synthetic peptide
RDGS

SEQ ID NO: 5823 - protein, 4 aa, Artificial Sequence
  Description of Artificial Sequence: Synthetic peptide
LDGF

SEQ ID NO: 5824 - protein, 4 aa, Artificial Sequence
  Description of Artificial Sequence: Synthetic peptide
VDGS

SEQ ID NO: 5825 - protein, 4 aa, Artificial Sequence
  Description of Artificial Sequence: Synthetic peptide
ADGF

SEQ ID NO: 5826 - protein, 4 aa, Artificial Sequence
  Description of Artificial Sequence: Synthetic peptide
LDGS

SEQ ID NO: 5827 - protein, 4 aa, Artificial Sequence
  Description of Artificial Sequence: Synthetic peptide
PDGS

SEQ ID NO: 5828 - protein, 4 aa, Artificial Sequence
  Description of Artificial Sequence: Synthetic peptide
PDGF

SEQ ID NO: 5829 - protein, 4 aa, Artificial Sequence
  Description of Artificial Sequence: Synthetic peptide
PDGY

SEQ ID NO: 5830 - protein, 4 aa, Artificial Sequence
  Description of Artificial Sequence: Synthetic peptide
TDGF

SEQ ID NO: 5831 - protein, 4 aa, Artificial Sequence
  Description of Artificial Sequence: Synthetic peptide
NYGG

SEQ ID NO: 5832 - protein, 4 aa, Artificial Sequence
  Description of Artificial Sequence: Synthetic peptide
TYGD

SEQ ID NO: 5833 - protein, 4 aa, Artificial Sequence
  Description of Artificial Sequence: Synthetic peptide
LYGD

SEQ ID NO: 5834 - protein, 4 aa, Artificial Sequence
  Description of Artificial Sequence: Synthetic peptide
FYGG

SEQ ID NO: 5835 - protein, 4 aa, Artificial Sequence
  Description of Artificial Sequence: Synthetic peptide
SYGG

SEQ ID NO: 5836 - protein, 4 aa, Artificial Sequence
  Description of Artificial Sequence: Synthetic peptide
TYGG

SEQ ID NO: 5837 - protein, 4 aa, Artificial Sequence
  Description of Artificial Sequence: Synthetic peptide
LYGA

SEQ ID NO: 5838 - protein, 4 aa, Artificial Sequence
  Description of Artificial Sequence: Synthetic peptide
SYGA

SEQ ID NO: 5839 - protein, 4 aa, Artificial Sequence
  Description of Artificial Sequence: Synthetic peptide
LYGG

SEQ ID NO: 5840 - protein, 4 aa, Artificial Sequence
  Description of Artificial Sequence: Synthetic peptide
VYGD

SEQ ID NO: 5841 - protein, 4 aa, Artificial Sequence
  Description of Artificial Sequence: Synthetic peptide
SYGD

SEQ ID NO: 5842 - protein, 4 aa, Artificial Sequence
  Description of Artificial Sequence: Synthetic peptide
AYGG

SEQ ID NO: 5843 - protein, 4 aa, Artificial Sequence
  Description of Artificial Sequence: Synthetic peptide
VYGG

SEQ ID NO: 5844 - protein, 4 aa, Artificial Sequence
  Description of Artificial Sequence: Synthetic peptide
HYGG

SEQ ID NO: 5845 - protein, 4 aa, Artificial Sequence
  Description of Artificial Sequence: Synthetic peptide
FYGA

SEQ ID NO: 5846 - protein, 4 aa, Artificial Sequence
  Description of Artificial Sequence: Synthetic peptide
NYGD

SEQ ID NO: 5847 - protein, 4 aa, Artificial Sequence
  Description of Artificial Sequence: Synthetic peptide
TYGA

SEQ ID NO: 5848 - protein, 4 aa, Artificial Sequence
  Description of Artificial Sequence: Synthetic peptide
FYGD

SEQ ID NO: 5849 - protein, 4 aa, Artificial Sequence
  Description of Artificial Sequence: Synthetic peptide
IYGD

SEQ ID NO: 5850 - protein, 4 aa, Artificial Sequence
  Description of Artificial Sequence: Synthetic peptide
PYGD

SEQ ID NO: 5851 - protein, 4 aa, Artificial Sequence
  Description of Artificial Sequence: Synthetic peptide
DYGA

SEQ ID NO: 5852 - protein, 4 aa, Artificial Sequence
  Description of Artificial Sequence: Synthetic peptide
HYGA

SEQ ID NO: 5853 - protein, 4 aa, Artificial Sequence
  Description of Artificial Sequence: Synthetic peptide
PYGA

SEQ ID NO: 5854 - protein, 4 aa, Artificial Sequence
  Description of Artificial Sequence: Synthetic peptide
PYGG

SEQ ID NO: 5855 - protein, 4 aa, Artificial Sequence
  Description of Artificial Sequence: Synthetic peptide
HYGD

SEQ ID NO: 5856 - protein, 4 aa, Artificial Sequence
  Description of Artificial Sequence: Synthetic peptide
AYGA

SEQ ID NO: 5857 - protein, 4 aa, Artificial Sequence
  Description of Artificial Sequence: Synthetic peptide
VYGA

SEQ ID NO: 5858 - protein, 4 aa, Artificial Sequence
  Description of Artificial Sequence: Synthetic peptide
YYGD

SEQ ID NO: 5859 - protein, 4 aa, Artificial Sequence
  Description of Artificial Sequence: Synthetic peptide
AYGD

SEQ ID NO: 5860 - protein, 4 aa, Artificial Sequence
  Description of Artificial Sequence: Synthetic peptide
NYGA

SEQ ID NO: 5861 - protein, 4 aa, Artificial Sequence
  Description of Artificial Sequence: Synthetic peptide
YYGA

SEQ ID NO: 5862 - protein, 4 aa, Artificial Sequence
  Description of Artificial Sequence: Synthetic peptide
YYGG

SEQ ID NO: 5863 - protein, 4 aa, Artificial Sequence
  Description of Artificial Sequence: Synthetic peptide
IYGG

SEQ ID NO: 5864 - protein, 4 aa, Artificial Sequence
  Description of Artificial Sequence: Synthetic peptide
IYGA

SEQ ID NO: 5865 - protein, 4 aa, Artificial Sequence
  Description of Artificial Sequence: Synthetic peptide
LMAT

SEQ ID NO: 5866 - protein, 4 aa, Artificial Sequence
  Description of Artificial Sequence: Synthetic peptide
VTAT

SEQ ID NO: 5867 - protein, 4 aa, Artificial Sequence
  Description of Artificial Sequence: Synthetic peptide
KMAT

SEQ ID NO: 5868 - protein, 4 aa, Artificial Sequence
  Description of Artificial Sequence: Synthetic peptide
QMAT

SEQ ID NO: 5869 - protein, 4 aa, Artificial Sequence
  Description of Artificial Sequence: Synthetic peptide
ETAT

SEQ ID NO: 5870 - protein, 4 aa, Artificial Sequence
  Description of Artificial Sequence: Synthetic peptide
TTAT

SEQ ID NO: 5871 - protein, 4 aa, Artificial Sequence
  Description of Artificial Sequence: Synthetic peptide
TMAT

SEQ ID NO: 5872 - protein, 4 aa, Artificial Sequence
  Description of Artificial Sequence: Synthetic peptide
PTAT

SEQ ID NO: 5873 - protein, 4 aa, Artificial Sequence
  Description of Artificial Sequence: Synthetic peptide
VMAT

SEQ ID NO: 5874 - protein, 4 aa, Artificial Sequence
  Description of Artificial Sequence: Synthetic peptide
LTAT

SEQ ID NO: 5875 - protein, 4 aa, Artificial Sequence
  Description of Artificial Sequence: Synthetic peptide
KTAT

SEQ ID NO: 5876 - protein, 4 aa, Artificial Sequence
  Description of Artificial Sequence: Synthetic peptide
MMAT

SEQ ID NO: 5877 - protein, 4 aa, Artificial Sequence
  Description of Artificial Sequence: Synthetic peptide
ATAT

SEQ ID NO: 5878 - protein, 4 aa, Artificial Sequence
  Description of Artificial Sequence: Synthetic peptide
QTAT

SEQ ID NO: 5879 - protein, 4 aa, Artificial Sequence
  Description of Artificial Sequence: Synthetic peptide
PMAT

SEQ ID NO: 5880 - protein, 4 aa, Artificial Sequence
  Description of Artificial Sequence: Synthetic peptide
MTAT

SEQ ID NO: 5881 - protein, 4 aa, Artificial Sequence
  Description of Artificial Sequence: Synthetic peptide
AMAT

SEQ ID NO: 5882 - protein, 4 aa, Artificial Sequence
  Description of Artificial Sequence: Synthetic peptide
TYSA

SEQ ID NO: 5883 - protein, 4 aa, Artificial Sequence
  Description of Artificial Sequence: Synthetic peptide
LYSS

SEQ ID NO: 5884 - protein, 4 aa, Artificial Sequence
  Description of Artificial Sequence: Synthetic peptide
LYST

SEQ ID NO: 5885 - protein, 4 aa, Artificial Sequence
  Description of Artificial Sequence: Synthetic peptide
QYSS

SEQ ID NO: 5886 - protein, 4 aa, Artificial Sequence
  Description of Artificial Sequence: Synthetic peptide
VYST

SEQ ID NO: 5887 - protein, 4 aa, Artificial Sequence
  Description of Artificial Sequence: Synthetic peptide
VYSS

SEQ ID NO: 5888 - protein, 4 aa, Artificial Sequence
  Description of Artificial Sequence: Synthetic peptide
AYSA

SEQ ID NO: 5889 - protein, 4 aa, Artificial Sequence
  Description of Artificial Sequence: Synthetic peptide
PYSG

SEQ ID NO: 5890 - protein, 4 aa, Artificial Sequence
  Description of Artificial Sequence: Synthetic peptide
PYST

SEQ ID NO: 5891 - protein, 4 aa, Artificial Sequence
  Description of Artificial Sequence: Synthetic peptide
VYSA

SEQ ID NO: 5892 - protein, 4 aa, Artificial Sequence
  Description of Artificial Sequence: Synthetic peptide
PYSS

SEQ ID NO: 5893 - protein, 4 aa, Artificial Sequence
  Description of Artificial Sequence: Synthetic peptide
VYSG

SEQ ID NO: 5894 - protein, 4 aa, Artificial Sequence
  Description of Artificial Sequence: Synthetic peptide
PYSA

SEQ ID NO: 5895 - protein, 4 aa, Artificial Sequence
  Description of Artificial Sequence: Synthetic peptide
KYST

SEQ ID NO: 5896 - protein, 4 aa, Artificial Sequence
  Description of Artificial Sequence: Synthetic peptide
QYST

SEQ ID NO: 5897 - protein, 4 aa, Artificial Sequence
  Description of Artificial Sequence: Synthetic peptide
TYSG

SEQ ID NO: 5898 - protein, 4 aa, Artificial Sequence
  Description of Artificial Sequence: Synthetic peptide
TYST

SEQ ID NO: 5899 - protein, 4 aa, Artificial Sequence
  Description of Artificial Sequence: Synthetic peptide
QYSA

SEQ ID NO: 5900 - protein, 4 aa, Artificial Sequence
  Description of Artificial Sequence: Synthetic peptide
AYSS

SEQ ID NO: 5901 - protein, 4 aa, Artificial Sequence
  Description of Artificial Sequence: Synthetic peptide
TYSS

SEQ ID NO: 5902 - protein, 4 aa, Artificial Sequence
  Description of Artificial Sequence: Synthetic peptide
IYSA

SEQ ID NO: 5903 - protein, 4 aa, Artificial Sequence
  Description of Artificial Sequence: Synthetic peptide
AYST

SEQ ID NO: 5904 - protein, 4 aa, Artificial Sequence
  Description of Artificial Sequence: Synthetic peptide
IYSG

SEQ ID NO: 5905 - protein, 4 aa, Artificial Sequence
  Description of Artificial Sequence: Synthetic peptide
KYSG

SEQ ID NO: 5906 - protein, 4 aa, Artificial Sequence
  Description of Artificial Sequence: Synthetic peptide
EYSA

SEQ ID NO: 5907 - protein, 4 aa, Artificial Sequence
  Description of Artificial Sequence: Synthetic peptide
LYSG

SEQ ID NO: 5908 - protein, 4 aa, Artificial Sequence
  Description of Artificial Sequence: Synthetic peptide
AYSG

SEQ ID NO: 5909 - protein, 4 aa, Artificial Sequence
  Description of Artificial Sequence: Synthetic peptide
EYSG

SEQ ID NO: 5910 - protein, 4 aa, Artificial Sequence
  Description of Artificial Sequence: Synthetic peptide
LYSA

SEQ ID NO: 5911 - protein, 4 aa, Artificial Sequence
  Description of Artificial Sequence: Synthetic peptide
QYSG

SEQ ID NO: 5912 - protein, 4 aa, Artificial Sequence
  Description of Artificial Sequence: Synthetic peptide
IYST

SEQ ID NO: 5913 - protein, 4 aa, Artificial Sequence
  Description of Artificial Sequence: Synthetic peptide
EYST

SEQ ID NO: 5914 - protein, 4 aa, Artificial Sequence
  Description of Artificial Sequence: Synthetic peptide
KYSS

SEQ ID NO: 5915 - protein, 4 aa, Artificial Sequence
  Description of Artificial Sequence: Synthetic peptide
IYSS

SEQ ID NO: 5916 - protein, 4 aa, Artificial Sequence
  Description of Artificial Sequence: Synthetic peptide
KYSA

SEQ ID NO: 5917 - protein, 4 aa, Artificial Sequence
  Description of Artificial Sequence: Synthetic peptide
QWLS

SEQ ID NO: 5918 - protein, 4 aa, Artificial Sequence
  Description of Artificial Sequence: Synthetic peptide
QWLL

SEQ ID NO: 5919 - protein, 4 aa, Artificial Sequence
  Description of Artificial Sequence: Synthetic peptide
QWLP

SEQ ID NO: 5920 - protein, 4 aa, Artificial Sequence
  Description of Artificial Sequence: Synthetic peptide
QWLD

SEQ ID NO: 5921 - protein, 4 aa, Artificial Sequence
  Description of Artificial Sequence: Synthetic peptide
QWLY

SEQ ID NO: 5922 - protein, 4 aa, Artificial Sequence
  Description of Artificial Sequence: Synthetic peptide
QWLA

SEQ ID NO: 5923 - protein, 4 aa, Artificial Sequence
  Description of Artificial Sequence: Synthetic peptide
QWLH

SEQ ID NO: 5924 - protein, 4 aa, Artificial Sequence
  Description of Artificial Sequence: Synthetic peptide
QWLF

SEQ ID NO: 5925 - protein, 4 aa, Artificial Sequence
  Description of Artificial Sequence: Synthetic peptide
PVAD

SEQ ID NO: 5926 - protein, 4 aa, Artificial Sequence
  Description of Artificial Sequence: Synthetic peptide
PVAA

SEQ ID NO: 5927 - protein, 4 aa, Artificial Sequence
  Description of Artificial Sequence: Synthetic peptide
IVAA

SEQ ID NO: 5928 - protein, 4 aa, Artificial Sequence
  Description of Artificial Sequence: Synthetic peptide
EVAA

SEQ ID NO: 5929 - protein, 4 aa, Artificial Sequence
  Description of Artificial Sequence: Synthetic peptide
EVAV

SEQ ID NO: 5930 - protein, 4 aa, Artificial Sequence
  Description of Artificial Sequence: Synthetic peptide
IVAD

SEQ ID NO: 5931 - protein, 4 aa, Artificial Sequence
  Description of Artificial Sequence: Synthetic peptide
EVAD

SEQ ID NO: 5932 - protein, 4 aa, Artificial Sequence
  Description of Artificial Sequence: Synthetic peptide
IVAG

SEQ ID NO: 5933 - protein, 4 aa, Artificial Sequence
  Description of Artificial Sequence: Synthetic peptide
QVAD

SEQ ID NO: 5934 - protein, 4 aa, Artificial Sequence
  Description of Artificial Sequence: Synthetic peptide
AVAA

SEQ ID NO: 5935 - protein, 4 aa, Artificial Sequence
  Description of Artificial Sequence: Synthetic peptide
AVAV

SEQ ID NO: 5936 - protein, 4 aa, Artificial Sequence
  Description of Artificial Sequence: Synthetic peptide
AVAD

SEQ ID NO: 5937 - protein, 4 aa, Artificial Sequence
  Description of Artificial Sequence: Synthetic peptide
KVAA

SEQ ID NO: 5938 - protein, 4 aa, Artificial Sequence
  Description of Artificial Sequence: Synthetic peptide
QVAA

SEQ ID NO: 5939 - protein, 4 aa, Artificial Sequence
  Description of Artificial Sequence: Synthetic peptide
TVAV

SEQ ID NO: 5940 - protein, 4 aa, Artificial Sequence
  Description of Artificial Sequence: Synthetic peptide
LVAD

SEQ ID NO: 5941 - protein, 4 aa, Artificial Sequence
  Description of Artificial Sequence: Synthetic peptide
LVAA

SEQ ID NO: 5942 - protein, 4 aa, Artificial Sequence
  Description of Artificial Sequence: Synthetic peptide
IVAV

SEQ ID NO: 5943 - protein, 4 aa, Artificial Sequence
  Description of Artificial Sequence: Synthetic peptide
VVAD

SEQ ID NO: 5944 - protein, 4 aa, Artificial Sequence
  Description of Artificial Sequence: Synthetic peptide
VVAV

SEQ ID NO: 5945 - protein, 4 aa, Artificial Sequence
  Description of Artificial Sequence: Synthetic peptide
QVAV

SEQ ID NO: 5946 - protein, 4 aa, Artificial Sequence
  Description of Artificial Sequence: Synthetic peptide
PVAV

SEQ ID NO: 5947 - protein, 4 aa, Artificial Sequence
  Description of Artificial Sequence: Synthetic peptide
KVAV

SEQ ID NO: 5948 - protein, 4 aa, Artificial Sequence
  Description of Artificial Sequence: Synthetic peptide
LVAV

SEQ ID NO: 5949 - protein, 4 aa, Artificial Sequence
  Description of Artificial Sequence: Synthetic peptide
TVAD

SEQ ID NO: 5950 - protein, 4 aa, Artificial Sequence
  Description of Artificial Sequence: Synthetic peptide
KVAD

SEQ ID NO: 5951 - protein, 4 aa, Artificial Sequence
  Description of Artificial Sequence: Synthetic peptide
TVAA

SEQ ID NO: 5952 - protein, 4 aa, Artificial Sequence
  Description of Artificial Sequence: Synthetic peptide
STVA

SEQ ID NO: 5953 - protein, 4 aa, Artificial Sequence
  Description of Artificial Sequence: Synthetic peptide
STVK

SEQ ID NO: 5954 - protein, 4 aa, Artificial Sequence
  Description of Artificial Sequence: Synthetic peptide
RTVA

SEQ ID NO: 5955 - protein, 4 aa, Artificial Sequence
  Description of Artificial Sequence: Synthetic peptide
ITVT

SEQ ID NO: 5956 - protein, 4 aa, Artificial Sequence
  Description of Artificial Sequence: Synthetic peptide
PTVA

SEQ ID NO: 5957 - protein, 4 aa, Artificial Sequence
  Description of Artificial Sequence: Synthetic peptide
ATVT

SEQ ID NO: 5958 - protein, 4 aa, Artificial Sequence
  Description of Artificial Sequence: Synthetic peptide
ATVK

SEQ ID NO: 5959 - protein, 4 aa, Artificial Sequence
  Description of Artificial Sequence: Synthetic peptide
VTVK

SEQ ID NO: 5960 - protein, 4 aa, Artificial Sequence
  Description of Artificial Sequence: Synthetic peptide
TTVK

SEQ ID NO: 5961 - protein, 4 aa, Artificial Sequence
  Description of Artificial Sequence: Synthetic peptide
PTVE

SEQ ID NO: 5962 - protein, 4 aa, Artificial Sequence
  Description of Artificial Sequence: Synthetic peptide
VTVT

SEQ ID NO: 5963 - protein, 4 aa, Artificial Sequence
  Description of Artificial Sequence: Synthetic peptide
STVT

SEQ ID NO: 5964 - protein, 4 aa, Artificial Sequence
  Description of Artificial Sequence: Synthetic peptide
VTVE

SEQ ID NO: 5965 - protein, 4 aa, Artificial Sequence
  Description of Artificial Sequence: Synthetic peptide
LTVA

SEQ ID NO: 5966 - protein, 4 aa, Artificial Sequence
  Description of Artificial Sequence: Synthetic peptide
RTVT

SEQ ID NO: 5967 - protein, 4 aa, Artificial Sequence
  Description of Artificial Sequence: Synthetic peptide
LTVE

SEQ ID NO: 5968 - protein, 4 aa, Artificial Sequence
  Description of Artificial Sequence: Synthetic peptide
TTVE

SEQ ID NO: 5969 - protein, 4 aa, Artificial Sequence
  Description of Artificial Sequence: Synthetic peptide
RTVK

SEQ ID NO: 5970 - protein, 4 aa, Artificial Sequence
  Description of Artificial Sequence: Synthetic peptide
VTVA

SEQ ID NO: 5971 - protein, 4 aa, Artificial Sequence
  Description of Artificial Sequence: Synthetic peptide
STVE

SEQ ID NO: 5972 - protein, 4 aa, Artificial Sequence
  Description of Artificial Sequence: Synthetic peptide
ATVA

SEQ ID NO: 5973 - protein, 4 aa, Artificial Sequence
  Description of Artificial Sequence: Synthetic peptide
GTVE

SEQ ID NO: 5974 - protein, 4 aa, Artificial Sequence
  Description of Artificial Sequence: Synthetic peptide
GTVA

SEQ ID NO: 5975 - protein, 4 aa, Artificial Sequence
  Description of Artificial Sequence: Synthetic peptide
ITVE

SEQ ID NO: 5976 - protein, 4 aa, Artificial Sequence
  Description of Artificial Sequence: Synthetic peptide
PTVT

SEQ ID NO: 5977 - protein, 4 aa, Artificial Sequence
  Description of Artificial Sequence: Synthetic peptide
ITVA

SEQ ID NO: 5978 - protein, 4 aa, Artificial Sequence
  Description of Artificial Sequence: Synthetic peptide
ATVE

SEQ ID NO: 5979 - protein, 4 aa, Artificial Sequence
  Description of Artificial Sequence: Synthetic peptide
GTVK

SEQ ID NO: 5980 - protein, 4 aa, Artificial Sequence
  Description of Artificial Sequence: Synthetic peptide
LTVK

SEQ ID NO: 5981 - protein, 4 aa, Artificial Sequence
  Description of Artificial Sequence: Synthetic peptide
ITVK

SEQ ID NO: 5982 - protein, 4 aa, Artificial Sequence
  Description of Artificial Sequence: Synthetic peptide
RTVE

SEQ ID NO: 5983 - protein, 4 aa, Artificial Sequence
  Description of Artificial Sequence: Synthetic peptide
LTVT

SEQ ID NO: 5984 - protein, 4 aa, Artificial Sequence
  Description of Artificial Sequence: Synthetic peptide
TTVA

SEQ ID NO: 5985 - protein, 4 aa, Artificial Sequence
  Description of Artificial Sequence: Synthetic peptide
PTVK

SEQ ID NO: 5986 - protein, 4 aa, Artificial Sequence
  Description of Artificial Sequence: Synthetic peptide
GTVT

SEQ ID NO: 5987 - protein, 4 aa, Artificial Sequence
  Description of Artificial Sequence: Synthetic peptide
SSSA

SEQ ID NO: 5988 - protein, 4 aa, Artificial Sequence
  Description of Artificial Sequence: Synthetic peptide
SSSL

SEQ ID NO: 5989 - protein, 4 aa, Artificial Sequence
  Description of Artificial Sequence: Synthetic peptide
SSSR

SEQ ID NO: 5990 - protein, 4 aa, Artificial Sequence
  Description of Artificial Sequence: Synthetic peptide
SSSV

SEQ ID NO: 5991 - protein, 4 aa, Artificial Sequence
  Description of Artificial Sequence: Synthetic peptide
SSST

SEQ ID NO: 5992 - protein, 4 aa, Artificial Sequence
  Description of Artificial Sequence: Synthetic peptide
SSSM

SEQ ID NO: 5993 - protein, 4 aa, Artificial Sequence
  Description of Artificial Sequence: Synthetic peptide
SSSG

SEQ ID NO: 5994 - protein, 4 aa, Artificial Sequence
  Description of Artificial Sequence: Synthetic peptide
LSYG

SEQ ID NO: 5995 - protein, 4 aa, Artificial Sequence
  Description of Artificial Sequence: Synthetic peptide
PYYG

SEQ ID NO: 5996 - protein, 4 aa, Artificial Sequence
  Description of Artificial Sequence: Synthetic peptide
ASYG

SEQ ID NO: 5997 - protein, 4 aa, Artificial Sequence
  Description of Artificial Sequence: Synthetic peptide
FYYG

SEQ ID NO: 5998 - protein, 4 aa, Artificial Sequence
  Description of Artificial Sequence: Synthetic peptide
DSYG

SEQ ID NO: 5999 - protein, 4 aa, Artificial Sequence
  Description of Artificial Sequence: Synthetic peptide
VYYG

SEQ ID NO: 6000 - protein, 4 aa, Artificial Sequence
  Description of Artificial Sequence: Synthetic peptide
IYYG

SEQ ID NO: 6001 - protein, 4 aa, Artificial Sequence
  Description of Artificial Sequence: Synthetic peptide
DYYG

SEQ ID NO: 6002 - protein, 4 aa, Artificial Sequence
  Description of Artificial Sequence: Synthetic peptide
HYYG

SEQ ID NO: 6003 - protein, 4 aa, Artificial Sequence
  Description of Artificial Sequence: Synthetic peptide
SYYG

SEQ ID NO: 6004 - protein, 4 aa, Artificial Sequence
  Description of Artificial Sequence: Synthetic peptide
VSYG

SEQ ID NO: 6005 - protein, 4 aa, Artificial Sequence
  Description of Artificial Sequence: Synthetic peptide
NSYG

SEQ ID NO: 6006 - protein, 4 aa, Artificial Sequence
  Description of Artificial Sequence: Synthetic peptide
SSYG

SEQ ID NO: 6007 - protein, 4 aa, Artificial Sequence
  Description of Artificial Sequence: Synthetic peptide
FSYG

SEQ ID NO: 6008 - protein, 4 aa, Artificial Sequence
  Description of Artificial Sequence: Synthetic peptide
ISYG

SEQ ID NO: 6009 - protein, 4 aa, Artificial Sequence
  Description of Artificial Sequence: Synthetic peptide
TSYG

SEQ ID NO: 6010 - protein, 4 aa, Artificial Sequence
  Description of Artificial Sequence: Synthetic peptide
LYYG

SEQ ID NO: 6011 - protein, 4 aa, Artificial Sequence
  Description of Artificial Sequence: Synthetic peptide
PSYG

SEQ ID NO: 6012 - protein, 4 aa, Artificial Sequence
  Description of Artificial Sequence: Synthetic peptide
AYYG

SEQ ID NO: 6013 - protein, 4 aa, Artificial Sequence
  Description of Artificial Sequence: Synthetic peptide
HSYG

SEQ ID NO: 6014 - protein, 4 aa, Artificial Sequence
  Description of Artificial Sequence: Synthetic peptide
NYYG

SEQ ID NO: 6015 - protein, 4 aa, Artificial Sequence
  Description of Artificial Sequence: Synthetic peptide
TYYG

SEQ ID NO: 6016 - protein, 4 aa, Artificial Sequence
  Description of Artificial Sequence: Synthetic peptide
FSWY

SEQ ID NO: 6017 - protein, 4 aa, Artificial Sequence
  Description of Artificial Sequence: Synthetic peptide
SSWF

SEQ ID NO: 6018 - protein, 4 aa, Artificial Sequence
  Description of Artificial Sequence: Synthetic peptide
DSWS

SEQ ID NO: 6019 - protein, 4 aa, Artificial Sequence
  Description of Artificial Sequence: Synthetic peptide
LSWS

SEQ ID NO: 6020 - protein, 4 aa, Artificial Sequence
  Description of Artificial Sequence: Synthetic peptide
DSWY

SEQ ID NO: 6021 - protein, 4 aa, Artificial Sequence
  Description of Artificial Sequence: Synthetic peptide
LSWF

SEQ ID NO: 6022 - protein, 4 aa, Artificial Sequence
  Description of Artificial Sequence: Synthetic peptide
LSWY

SEQ ID NO: 6023 - protein, 4 aa, Artificial Sequence
  Description of Artificial Sequence: Synthetic peptide
VSWS

SEQ ID NO: 6024 - protein, 4 aa, Artificial Sequence
  Description of Artificial Sequence: Synthetic peptide
HSWY

SEQ ID NO: 6025 - protein, 4 aa, Artificial Sequence
  Description of Artificial Sequence: Synthetic peptide
SSWS

SEQ ID NO: 6026 - protein, 4 aa, Artificial Sequence
  Description of Artificial Sequence: Synthetic peptide
PSWS

SEQ ID NO: 6027 - protein, 4 aa, Artificial Sequence
  Description of Artificial Sequence: Synthetic peptide
FSWF

SEQ ID NO: 6028 - protein, 4 aa, Artificial Sequence
  Description of Artificial Sequence: Synthetic peptide
FSWS

SEQ ID NO: 6029 - protein, 4 aa, Artificial Sequence
  Description of Artificial Sequence: Synthetic peptide
PSWF

SEQ ID NO: 6030 - protein, 4 aa, Artificial Sequence
  Description of Artificial Sequence: Synthetic peptide
VSWF

SEQ ID NO: 6031 - protein, 4 aa, Artificial Sequence
  Description of Artificial Sequence: Synthetic peptide
HSWF

SEQ ID NO: 6032 - protein, 4 aa, Artificial Sequence
  Description of Artificial Sequence: Synthetic peptide
VSWY

SEQ ID NO: 6033 - protein, 4 aa, Artificial Sequence
  Description of Artificial Sequence: Synthetic peptide
HSWS

SEQ ID NO: 6034 - protein, 4 aa, Artificial Sequence
  Description of Artificial Sequence: Synthetic peptide
DSWF

SEQ ID NO: 6035 - protein, 4 aa, Artificial Sequence
  Description of Artificial Sequence: Synthetic peptide
PSWY

SEQ ID NO: 6036 - protein, 4 aa, Artificial Sequence
  Description of Artificial Sequence: Synthetic peptide
ASWY

SEQ ID NO: 6037 - protein, 4 aa, Artificial Sequence
  Description of Artificial Sequence: Synthetic peptide
YSWS

SEQ ID NO: 6038 - protein, 4 aa, Artificial Sequence
  Description of Artificial Sequence: Synthetic peptide
ASWF

SEQ ID NO: 6039 - protein, 4 aa, Artificial Sequence
  Description of Artificial Sequence: Synthetic peptide
ASWS

SEQ ID NO: 6040 - protein, 4 aa, Artificial Sequence
  Description of Artificial Sequence: Synthetic peptide
YSWF

SEQ ID NO: 6041 - protein, 4 aa, Artificial Sequence
  Description of Artificial Sequence: Synthetic peptide
YSWY

SEQ ID NO: 6042 - protein, 4 aa, Artificial Sequence
  Description of Artificial Sequence: Synthetic peptide
IQLV

SEQ ID NO: 6043 - protein, 4 aa, Artificial Sequence
  Description of Artificial Sequence: Synthetic peptide
AQLG

SEQ ID NO: 6044 - protein, 4 aa, Artificial Sequence
  Description of Artificial Sequence: Synthetic peptide
IQLA

SEQ ID NO: 6045 - protein, 4 aa, Artificial Sequence
  Description of Artificial Sequence: Synthetic peptide
EQLV

SEQ ID NO: 6046 - protein, 4 aa, Artificial Sequence
  Description of Artificial Sequence: Synthetic peptide
AQLA

SEQ ID NO: 6047 - protein, 4 aa, Artificial Sequence
  Description of Artificial Sequence: Synthetic peptide
IQLG

SEQ ID NO: 6048 - protein, 4 aa, Artificial Sequence
  Description of Artificial Sequence: Synthetic peptide
KQLD

SEQ ID NO: 6049 - protein, 4 aa, Artificial Sequence
  Description of Artificial Sequence: Synthetic peptide
TQLV

SEQ ID NO: 6050 - protein, 4 aa, Artificial Sequence
  Description of Artificial Sequence: Synthetic peptide
QQLA

SEQ ID NO: 6051 - protein, 4 aa, Artificial Sequence
  Description of Artificial Sequence: Synthetic peptide
AQLD

SEQ ID NO: 6052 - protein, 4 aa, Artificial Sequence
  Description of Artificial Sequence: Synthetic peptide
IQLD

SEQ ID NO: 6053 - protein, 4 aa, Artificial Sequence
  Description of Artificial Sequence: Synthetic peptide
AQLV

SEQ ID NO: 6054 - protein, 4 aa, Artificial Sequence
  Description of Artificial Sequence: Synthetic peptide
KQLA

SEQ ID NO: 6055 - protein, 4 aa, Artificial Sequence
  Description of Artificial Sequence: Synthetic peptide
KQLG

SEQ ID NO: 6056 - protein, 4 aa, Artificial Sequence
  Description of Artificial Sequence: Synthetic peptide
LQLD

SEQ ID NO: 6057 - protein, 4 aa, Artificial Sequence
  Description of Artificial Sequence: Synthetic peptide
LQLG

SEQ ID NO: 6058 - protein, 4 aa, Artificial Sequence
  Description of Artificial Sequence: Synthetic peptide
TQLA

SEQ ID NO: 6059 - protein, 4 aa, Artificial Sequence
  Description of Artificial Sequence: Synthetic peptide
VQLD

SEQ ID NO: 6060 - protein, 4 aa, Artificial Sequence
  Description of Artificial Sequence: Synthetic peptide
TQLD

SEQ ID NO: 6061 - protein, 4 aa, Artificial Sequence
  Description of Artificial Sequence: Synthetic peptide
VQLA

SEQ ID NO: 6062 - protein, 4 aa, Artificial Sequence
  Description of Artificial Sequence: Synthetic peptide
EQLD

SEQ ID NO: 6063 - protein, 4 aa, Artificial Sequence
  Description of Artificial Sequence: Synthetic peptide
VQLG

SEQ ID NO: 6064 - protein, 4 aa, Artificial Sequence
  Description of Artificial Sequence: Synthetic peptide
TQLG

SEQ ID NO: 6065 - protein, 4 aa, Artificial Sequence
  Description of Artificial Sequence: Synthetic peptide
PQLD

SEQ ID NO: 6066 - protein, 4 aa, Artificial Sequence
  Description of Artificial Sequence: Synthetic peptide
QQLD

SEQ ID NO: 6067 - protein, 4 aa, Artificial Sequence
  Description of Artificial Sequence: Synthetic peptide
PQLA

SEQ ID NO: 6068 - protein, 4 aa, Artificial Sequence
  Description of Artificial Sequence: Synthetic peptide
PQLG

SEQ ID NO: 6069 - protein, 4 aa, Artificial Sequence
  Description of Artificial Sequence: Synthetic peptide
VQLV

SEQ ID NO: 6070 - protein, 4 aa, Artificial Sequence
  Description of Artificial Sequence: Synthetic peptide
QQLG

SEQ ID NO: 6071 - protein, 4 aa, Artificial Sequence
  Description of Artificial Sequence: Synthetic peptide
KQLV

SEQ ID NO: 6072 - protein, 4 aa, Artificial Sequence
  Description of Artificial Sequence: Synthetic peptide
LQLV

SEQ ID NO: 6073 - protein, 4 aa, Artificial Sequence
  Description of Artificial Sequence: Synthetic peptide
LQLA

SEQ ID NO: 6074 - protein, 4 aa, Artificial Sequence
  Description of Artificial Sequence: Synthetic peptide
EQLA

SEQ ID NO: 6075 - protein, 4 aa, Artificial Sequence
  Description of Artificial Sequence: Synthetic peptide
PQLV

SEQ ID NO: 6076 - protein, 4 aa, Artificial Sequence
  Description of Artificial Sequence: Synthetic peptide
EQLG

SEQ ID NO: 6077 - protein, 4 aa, Artificial Sequence
  Description of Artificial Sequence: Synthetic peptide
DGSA

SEQ ID NO: 6078 - protein, 4 aa, Artificial Sequence
  Description of Artificial Sequence: Synthetic peptide
DGSS

SEQ ID NO: 6079 - protein, 4 aa, Artificial Sequence
  Description of Artificial Sequence: Synthetic peptide
SGSA

SEQ ID NO: 6080 - protein, 4 aa, Artificial Sequence
  Description of Artificial Sequence: Synthetic peptide
DGSD

SEQ ID NO: 6081 - protein, 4 aa, Artificial Sequence
  Description of Artificial Sequence: Synthetic peptide
SGSD

SEQ ID NO: 6082 - protein, 4 aa, Artificial Sequence
  Description of Artificial Sequence: Synthetic peptide
PGSD

SEQ ID NO: 6083 - protein, 4 aa, Artificial Sequence
  Description of Artificial Sequence: Synthetic peptide
FGSS

SEQ ID NO: 6084 - protein, 4 aa, Artificial Sequence
  Description of Artificial Sequence: Synthetic peptide
HGSA

SEQ ID NO: 6085 - protein, 4 aa, Artificial Sequence
  Description of Artificial Sequence: Synthetic peptide
YGSS

SEQ ID NO: 6086 - protein, 4 aa, Artificial Sequence
  Description of Artificial Sequence: Synthetic peptide
FGSA

SEQ ID NO: 6087 - protein, 4 aa, Artificial Sequence
  Description of Artificial Sequence: Synthetic peptide
FGSD

SEQ ID NO: 6088 - protein, 4 aa, Artificial Sequence
  Description of Artificial Sequence: Synthetic peptide
LGSA

SEQ ID NO: 6089 - protein, 4 aa, Artificial Sequence
  Description of Artificial Sequence: Synthetic peptide
LGSS

SEQ ID NO: 6090 - protein, 4 aa, Artificial Sequence
  Description of Artificial Sequence: Synthetic peptide
AGSD

SEQ ID NO: 6091 - protein, 4 aa, Artificial Sequence
  Description of Artificial Sequence: Synthetic peptide
VGSS

SEQ ID NO: 6092 - protein, 4 aa, Artificial Sequence
  Description of Artificial Sequence: Synthetic peptide
AGSS

SEQ ID NO: 6093 - protein, 4 aa, Artificial Sequence
  Description of Artificial Sequence: Synthetic peptide
HGSD

SEQ ID NO: 6094 - protein, 4 aa, Artificial Sequence
  Description of Artificial Sequence: Synthetic peptide
VGSA

SEQ ID NO: 6095 - protein, 4 aa, Artificial Sequence
  Description of Artificial Sequence: Synthetic peptide
YGSA

SEQ ID NO: 6096 - protein, 4 aa, Artificial Sequence
  Description of Artificial Sequence: Synthetic peptide
YGSD

SEQ ID NO: 6097 - protein, 4 aa, Artificial Sequence
  Description of Artificial Sequence: Synthetic peptide
AGSA

SEQ ID NO: 6098 - protein, 4 aa, Artificial Sequence
  Description of Artificial Sequence: Synthetic peptide
HGSS

SEQ ID NO: 6099 - protein, 4 aa, Artificial Sequence
  Description of Artificial Sequence: Synthetic peptide
VGSD

SEQ ID NO: 6100 - protein, 4 aa, Artificial Sequence
  Description of Artificial Sequence: Synthetic peptide
PGSA

SEQ ID NO: 6101 - protein, 4 aa, Artificial Sequence
  Description of Artificial Sequence: Synthetic peptide
PGSS

SEQ ID NO: 6102 - protein, 4 aa, Artificial Sequence
  Description of Artificial Sequence: Synthetic peptide
SGSS

SEQ ID NO: 6103 - protein, 4 aa, Artificial Sequence
  Description of Artificial Sequence: Synthetic peptide
LGSD

SEQ ID NO: 6104 - protein, 4 aa, Artificial Sequence
  Description of Artificial Sequence: Synthetic peptide
PGWY

SEQ ID NO: 6105 - protein, 4 aa, Artificial Sequence
  Description of Artificial Sequence: Synthetic peptide
FGWY

SEQ ID NO: 6106 - protein, 4 aa, Artificial Sequence
  Description of Artificial Sequence: Synthetic peptide
YGWY

SEQ ID NO: 6107 - protein, 4 aa, Artificial Sequence
  Description of Artificial Sequence: Synthetic peptide
AGWY

SEQ ID NO: 6108 - protein, 4 aa, Artificial Sequence
  Description of Artificial Sequence: Synthetic peptide
VGWY

SEQ ID NO: 6109 - protein, 4 aa, Artificial Sequence
  Description of Artificial Sequence: Synthetic peptide
LGWY

SEQ ID NO: 6110 - protein, 4 aa, Artificial Sequence
  Description of Artificial Sequence: Synthetic peptide
DGWY

SEQ ID NO: 6111 - protein, 4 aa, Artificial Sequence
  Description of Artificial Sequence: Synthetic peptide
HGWY

SEQ ID NO: 6112 - protein, 4 aa, Artificial Sequence
  Description of Artificial Sequence: Synthetic peptide
PSGW

SEQ ID NO: 6113 - protein, 4 aa, Artificial Sequence
  Description of Artificial Sequence: Synthetic peptide
YSGW

SEQ ID NO: 6114 - protein, 4 aa, Artificial Sequence
  Description of Artificial Sequence: Synthetic peptide
FSGR

SEQ ID NO: 6115 - protein, 4 aa, Artificial Sequence
  Description of Artificial Sequence: Synthetic peptide
VSGG

SEQ ID NO: 6116 - protein, 4 aa, Artificial Sequence
  Description of Artificial Sequence: Synthetic peptide
NSGR

SEQ ID NO: 6117 - protein, 4 aa, Artificial Sequence
  Description of Artificial Sequence: Synthetic peptide
DSGR

SEQ ID NO: 6118 - protein, 4 aa, Artificial Sequence
  Description of Artificial Sequence: Synthetic peptide
ASGR

SEQ ID NO: 6119 - protein, 4 aa, Artificial Sequence
  Description of Artificial Sequence: Synthetic peptide
FSGW

SEQ ID NO: 6120 - protein, 4 aa, Artificial Sequence
  Description of Artificial Sequence: Synthetic peptide
DSGW

SEQ ID NO: 6121 - protein, 4 aa, Artificial Sequence
  Description of Artificial Sequence: Synthetic peptide
VSGR

SEQ ID NO: 6122 - protein, 4 aa, Artificial Sequence
  Description of Artificial Sequence: Synthetic peptide
ISGW

SEQ ID NO: 6123 - protein, 4 aa, Artificial Sequence
  Description of Artificial Sequence: Synthetic peptide
LSGW

SEQ ID NO: 6124 - protein, 4 aa, Artificial Sequence
  Description of Artificial Sequence: Synthetic peptide
HSGR

SEQ ID NO: 6125 - protein, 4 aa, Artificial Sequence
  Description of Artificial Sequence: Synthetic peptide
NSGW

SEQ ID NO: 6126 - protein, 4 aa, Artificial Sequence
  Description of Artificial Sequence: Synthetic peptide
HSGG

SEQ ID NO: 6127 - protein, 4 aa, Artificial Sequence
  Description of Artificial Sequence: Synthetic peptide
HSGW

SEQ ID NO: 6128 - protein, 4 aa, Artificial Sequence
  Description of Artificial Sequence: Synthetic peptide
ISGG

SEQ ID NO: 6129 - protein, 4 aa, Artificial Sequence
  Description of Artificial Sequence: Synthetic peptide
YSGR

SEQ ID NO: 6130 - protein, 4 aa, Artificial Sequence
  Description of Artificial Sequence: Synthetic peptide
ISGR

SEQ ID NO: 6131 - protein, 4 aa, Artificial Sequence
  Description of Artificial Sequence: Synthetic peptide
YSGG

SEQ ID NO: 6132 - protein, 4 aa, Artificial Sequence
  Description of Artificial Sequence: Synthetic peptide
NSGG

SEQ ID NO: 6133 - protein, 4 aa, Artificial Sequence
  Description of Artificial Sequence: Synthetic peptide
VSGW

SEQ ID NO: 6134 - protein, 4 aa, Artificial Sequence
  Description of Artificial Sequence: Synthetic peptide
SSGR

SEQ ID NO: 6135 - protein, 4 aa, Artificial Sequence
  Description of Artificial Sequence: Synthetic peptide
LSGR

SEQ ID NO: 6136 - protein, 4 aa, Artificial Sequence
  Description of Artificial Sequence: Synthetic peptide
PSGR

SEQ ID NO: 6137 - protein, 4 aa, Artificial Sequence
  Description of Artificial Sequence: Synthetic peptide
FSGG

SEQ ID NO: 6138 - protein, 4 aa, Artificial Sequence
  Description of Artificial Sequence: Synthetic peptide
TSGR

SEQ ID NO: 6139 - protein, 4 aa, Artificial Sequence
  Description of Artificial Sequence: Synthetic peptide
TSGW

SEQ ID NO: 6140 - protein, 4 aa, Artificial Sequence
  Description of Artificial Sequence: Synthetic peptide
ASGG

SEQ ID NO: 6141 - protein, 4 aa, Artificial Sequence
  Description of Artificial Sequence: Synthetic peptide
LSGG

SEQ ID NO: 6142 - protein, 4 aa, Artificial Sequence
  Description of Artificial Sequence: Synthetic peptide
ASGW

SEQ ID NO: 6143 - protein, 4 aa, Artificial Sequence
  Description of Artificial Sequence: Synthetic peptide
PSGG

SEQ ID NO: 6144 - protein, 4 aa, Artificial Sequence
  Description of Artificial Sequence: Synthetic peptide
TSGG

SEQ ID NO: 6145 - protein, 4 aa, Artificial Sequence
  Description of Artificial Sequence: Synthetic peptide
SSGG

SEQ ID NO: 6146 - protein, 4 aa, Artificial Sequence
  Description of Artificial Sequence: Synthetic peptide
VGYD

SEQ ID NO: 6147 - protein, 4 aa, Artificial Sequence
  Description of Artificial Sequence: Synthetic peptide
AGYD

SEQ ID NO: 6148 - protein, 4 aa, Artificial Sequence
  Description of Artificial Sequence: Synthetic peptide
DGYD

SEQ ID NO: 6149 - protein, 4 aa, Artificial Sequence
  Description of Artificial Sequence: Synthetic peptide
AGYA

SEQ ID NO: 6150 - protein, 4 aa, Artificial Sequence
  Description of Artificial Sequence: Synthetic peptide
DGYA

SEQ ID NO: 6151 - protein, 4 aa, Artificial Sequence
  Description of Artificial Sequence: Synthetic peptide
FGYA

SEQ ID NO: 6152 - protein, 4 aa, Artificial Sequence
  Description of Artificial Sequence: Synthetic peptide
FGYD

SEQ ID NO: 6153 - protein, 4 aa, Artificial Sequence
  Description of Artificial Sequence: Synthetic peptide
PGYA

SEQ ID NO: 6154 - protein, 4 aa, Artificial Sequence
  Description of Artificial Sequence: Synthetic peptide
DGYS

SEQ ID NO: 6155 - protein, 4 aa, Artificial Sequence
  Description of Artificial Sequence: Synthetic peptide
YGYA

SEQ ID NO: 6156 - protein, 4 aa, Artificial Sequence
  Description of Artificial Sequence: Synthetic peptide
FGYS

SEQ ID NO: 6157 - protein, 4 aa, Artificial Sequence
  Description of Artificial Sequence: Synthetic peptide
VGYA

SEQ ID NO: 6158 - protein, 4 aa, Artificial Sequence
  Description of Artificial Sequence: Synthetic peptide
PGYD

SEQ ID NO: 6159 - protein, 4 aa, Artificial Sequence
  Description of Artificial Sequence: Synthetic peptide
PGYS

SEQ ID NO: 6160 - protein, 4 aa, Artificial Sequence
  Description of Artificial Sequence: Synthetic peptide
VGYS

SEQ ID NO: 6161 - protein, 4 aa, Artificial Sequence
  Description of Artificial Sequence: Synthetic peptide
YGYD

SEQ ID NO: 6162 - protein, 4 aa, Artificial Sequence
  Description of Artificial Sequence: Synthetic peptide
HGYA

SEQ ID NO: 6163 - protein, 4 aa, Artificial Sequence
  Description of Artificial Sequence: Synthetic peptide
YGYS

SEQ ID NO: 6164 - protein, 4 aa, Artificial Sequence
  Description of Artificial Sequence: Synthetic peptide
HGYD

SEQ ID NO: 6165 - protein, 4 aa, Artificial Sequence
  Description of Artificial Sequence: Synthetic peptide
SGYS

SEQ ID NO: 6166 - protein, 4 aa, Artificial Sequence
  Description of Artificial Sequence: Synthetic peptide
LGYA

SEQ ID NO: 6167 - protein, 4 aa, Artificial Sequence
  Description of Artificial Sequence: Synthetic peptide
HGYS

SEQ ID NO: 6168 - protein, 4 aa, Artificial Sequence
  Description of Artificial Sequence: Synthetic peptide
LGYD

SEQ ID NO: 6169 - protein, 4 aa, Artificial Sequence
  Description of Artificial Sequence: Synthetic peptide
AGYS

SEQ ID NO: 6170 - protein, 4 aa, Artificial Sequence
  Description of Artificial Sequence: Synthetic peptide
LGYS

SEQ ID NO: 6171 - protein, 4 aa, Artificial Sequence
  Description of Artificial Sequence: Synthetic peptide
SGYA

SEQ ID NO: 6172 - protein, 4 aa, Artificial Sequence
  Description of Artificial Sequence: Synthetic peptide
QVTA

SEQ ID NO: 6173 - protein, 4 aa, Artificial Sequence
  Description of Artificial Sequence: Synthetic peptide
PVTA

SEQ ID NO: 6174 - protein, 4 aa, Artificial Sequence
  Description of Artificial Sequence: Synthetic peptide
LVTT

SEQ ID NO: 6175 - protein, 4 aa, Artificial Sequence
  Description of Artificial Sequence: Synthetic peptide
PVTT

SEQ ID NO: 6176 - protein, 4 aa, Artificial Sequence
  Description of Artificial Sequence: Synthetic peptide
PVTE

SEQ ID NO: 6177 - protein, 4 aa, Artificial Sequence
  Description of Artificial Sequence: Synthetic peptide
QVTT

SEQ ID NO: 6178 - protein, 4 aa, Artificial Sequence
  Description of Artificial Sequence: Synthetic peptide
AVTA

SEQ ID NO: 6179 - protein, 4 aa, Artificial Sequence
  Description of Artificial Sequence: Synthetic peptide
QVTK

SEQ ID NO: 6180 - protein, 4 aa, Artificial Sequence
  Description of Artificial Sequence: Synthetic peptide
IVTA

SEQ ID NO: 6181 - protein, 4 aa, Artificial Sequence
  Description of Artificial Sequence: Synthetic peptide
PVTK

SEQ ID NO: 6182 - protein, 4 aa, Artificial Sequence
  Description of Artificial Sequence: Synthetic peptide
LVTK

SEQ ID NO: 6183 - protein, 4 aa, Artificial Sequence
  Description of Artificial Sequence: Synthetic peptide
AVTE

SEQ ID NO: 6184 - protein, 4 aa, Artificial Sequence
  Description of Artificial Sequence: Synthetic peptide
LVTA

SEQ ID NO: 6185 - protein, 4 aa, Artificial Sequence
  Description of Artificial Sequence: Synthetic peptide
EVTA

SEQ ID NO: 6186 - protein, 4 aa, Artificial Sequence
  Description of Artificial Sequence: Synthetic peptide
LVTE

SEQ ID NO: 6187 - protein, 4 aa, Artificial Sequence
  Description of Artificial Sequence: Synthetic peptide
EVTE

SEQ ID NO: 6188 - protein, 4 aa, Artificial Sequence
  Description of Artificial Sequence: Synthetic peptide
IVTE

SEQ ID NO: 6189 - protein, 4 aa, Artificial Sequence
  Description of Artificial Sequence: Synthetic peptide
TVTK

SEQ ID NO: 6190 - protein, 4 aa, Artificial Sequence
  Description of Artificial Sequence: Synthetic peptide
IVTT

SEQ ID NO: 6191 - protein, 4 aa, Artificial Sequence
  Description of Artificial Sequence: Synthetic peptide
VVTE

SEQ ID NO: 6192 - protein, 4 aa, Artificial Sequence
  Description of Artificial Sequence: Synthetic peptide
IVTK

SEQ ID NO: 6193 - protein, 4 aa, Artificial Sequence
  Description of Artificial Sequence: Synthetic peptide
TVTE

SEQ ID NO: 6194 - protein, 4 aa, Artificial Sequence
  Description of Artificial Sequence: Synthetic peptide
AVTT

SEQ ID NO: 6195 - protein, 4 aa, Artificial Sequence
  Description of Artificial Sequence: Synthetic peptide
KVTA

SEQ ID NO: 6196 - protein, 4 aa, Artificial Sequence
  Description of Artificial Sequence: Synthetic peptide
KVTE

SEQ ID NO: 6197 - protein, 4 aa, Artificial Sequence
  Description of Artificial Sequence: Synthetic peptide
AVTK

SEQ ID NO: 6198 - protein, 4 aa, Artificial Sequence
  Description of Artificial Sequence: Synthetic peptide
EVTK

SEQ ID NO: 6199 - protein, 4 aa, Artificial Sequence
  Description of Artificial Sequence: Synthetic peptide
KVTK

SEQ ID NO: 6200 - protein, 4 aa, Artificial Sequence
  Description of Artificial Sequence: Synthetic peptide
VVTK

SEQ ID NO: 6201 - protein, 4 aa, Artificial Sequence
  Description of Artificial Sequence: Synthetic peptide
TVTA

SEQ ID NO: 6202 - protein, 4 aa, Artificial Sequence
  Description of Artificial Sequence: Synthetic peptide
QVTE

SEQ ID NO: 6203 - protein, 4 aa, Artificial Sequence
  Description of Artificial Sequence: Synthetic peptide
VVTT

SEQ ID NO: 6204 - protein, 4 aa, Artificial Sequence
  Description of Artificial Sequence: Synthetic peptide
EVTT

SEQ ID NO: 6205 - protein, 4 aa, Artificial Sequence
  Description of Artificial Sequence: Synthetic peptide
KVTT

SEQ ID NO: 6206 - protein, 4 aa, Artificial Sequence
  Description of Artificial Sequence: Synthetic peptide
AAAS

SEQ ID NO: 6207 - protein, 4 aa, Artificial Sequence
  Description of Artificial Sequence: Synthetic peptide
AAAL

SEQ ID NO: 6208 - protein, 4 aa, Artificial Sequence
  Description of Artificial Sequence: Synthetic peptide
AAAR

SEQ ID NO: 6209 - protein, 4 aa, Artificial Sequence
  Description of Artificial Sequence: Synthetic peptide
AAAI

SEQ ID NO: 6210 - protein, 4 aa, Artificial Sequence
  Description of Artificial Sequence: Synthetic peptide
AAAV

SEQ ID NO: 6211 - protein, 4 aa, Artificial Sequence
  Description of Artificial Sequence: Synthetic peptide
AAAP

SEQ ID NO: 6212 - protein, 4 aa, Artificial Sequence
  Description of Artificial Sequence: Synthetic peptide
AAAA

SEQ ID NO: 6213 - protein, 4 aa, Artificial Sequence
  Description of Artificial Sequence: Synthetic peptide
AIFG

SEQ ID NO: 6214 - protein, 4 aa, Artificial Sequence
  Description of Artificial Sequence: Synthetic peptide
ATFG

SEQ ID NO: 6215 - protein, 4 aa, Artificial Sequence
  Description of Artificial Sequence: Synthetic peptide
PTFG

SEQ ID NO: 6216 - protein, 4 aa, Artificial Sequence
  Description of Artificial Sequence: Synthetic peptide
TTFG

SEQ ID NO: 6217 - protein, 4 aa, Artificial Sequence
  Description of Artificial Sequence: Synthetic peptide
RTFG

SEQ ID NO: 6218 - protein, 4 aa, Artificial Sequence
  Description of Artificial Sequence: Synthetic peptide
STFG

SEQ ID NO: 6219 - protein, 4 aa, Artificial Sequence
  Description of Artificial Sequence: Synthetic peptide
SIFG

SEQ ID NO: 6220 - protein, 4 aa, Artificial Sequence
  Description of Artificial Sequence: Synthetic peptide
LIFG

SEQ ID NO: 6221 - protein, 4 aa, Artificial Sequence
  Description of Artificial Sequence: Synthetic peptide
RIFG

SEQ ID NO: 6222 - protein, 4 aa, Artificial Sequence
  Description of Artificial Sequence: Synthetic peptide
GIFG

SEQ ID NO: 6223 - protein, 4 aa, Artificial Sequence
  Description of Artificial Sequence: Synthetic peptide
IIFG

SEQ ID NO: 6224 - protein, 4 aa, Artificial Sequence
  Description of Artificial Sequence: Synthetic peptide
LTFG

SEQ ID NO: 6225 - protein, 4 aa, Artificial Sequence
  Description of Artificial Sequence: Synthetic peptide
VIFG

SEQ ID NO: 6226 - protein, 4 aa, Artificial Sequence
  Description of Artificial Sequence: Synthetic peptide
PIFG

SEQ ID NO: 6227 - protein, 4 aa, Artificial Sequence
  Description of Artificial Sequence: Synthetic peptide
GTFG

SEQ ID NO: 6228 - protein, 4 aa, Artificial Sequence
  Description of Artificial Sequence: Synthetic peptide
VTFG

SEQ ID NO: 6229 - protein, 4 aa, Artificial Sequence
  Description of Artificial Sequence: Synthetic peptide
VAAK

SEQ ID NO: 6230 - protein, 4 aa, Artificial Sequence
  Description of Artificial Sequence: Synthetic peptide
VAAL

SEQ ID NO: 6231 - protein, 4 aa, Artificial Sequence
  Description of Artificial Sequence: Synthetic peptide
VAAP

SEQ ID NO: 6232 - protein, 4 aa, Artificial Sequence
  Description of Artificial Sequence: Synthetic peptide
VAAQ

SEQ ID NO: 6233 - protein, 4 aa, Artificial Sequence
  Description of Artificial Sequence: Synthetic peptide
VAAA

SEQ ID NO: 6234 - protein, 4 aa, Artificial Sequence
  Description of Artificial Sequence: Synthetic peptide
VAAE

SEQ ID NO: 6235 - protein, 4 aa, Artificial Sequence
  Description of Artificial Sequence: Synthetic peptide
VAAV

SEQ ID NO: 6236 - protein, 4 aa, Artificial Sequence
  Description of Artificial Sequence: Synthetic peptide
VAAI

SEQ ID NO: 6237 - protein, 4 aa, Artificial Sequence
  Description of Artificial Sequence: Synthetic peptide
VYYA

SEQ ID NO: 6238 - protein, 4 aa, Artificial Sequence
  Description of Artificial Sequence: Synthetic peptide
AYYD

SEQ ID NO: 6239 - protein, 4 aa, Artificial Sequence
  Description of Artificial Sequence: Synthetic peptide
YYYA

SEQ ID NO: 6240 - protein, 4 aa, Artificial Sequence
  Description of Artificial Sequence: Synthetic peptide
PYYD

SEQ ID NO: 6241 - protein, 4 aa, Artificial Sequence
  Description of Artificial Sequence: Synthetic peptide
IYYD

SEQ ID NO: 6242 - protein, 4 aa, Artificial Sequence
  Description of Artificial Sequence: Synthetic peptide
VYYD

SEQ ID NO: 6243 - protein, 4 aa, Artificial Sequence
  Description of Artificial Sequence: Synthetic peptide
IYYA

SEQ ID NO: 6244 - protein, 4 aa, Artificial Sequence
  Description of Artificial Sequence: Synthetic peptide
TYYA

SEQ ID NO: 6245 - protein, 4 aa, Artificial Sequence
  Description of Artificial Sequence: Synthetic peptide
LYYD

SEQ ID NO: 6246 - protein, 4 aa, Artificial Sequence
  Description of Artificial Sequence: Synthetic peptide
DYYD

SEQ ID NO: 6247 - protein, 4 aa, Artificial Sequence
  Description of Artificial Sequence: Synthetic peptide
SYYD

SEQ ID NO: 6248 - protein, 4 aa, Artificial Sequence
  Description of Artificial Sequence: Synthetic peptide
LYYA

SEQ ID NO: 6249 - protein, 4 aa, Artificial Sequence
  Description of Artificial Sequence: Synthetic peptide
HYYA

SEQ ID NO: 6250 - protein, 4 aa, Artificial Sequence
  Description of Artificial Sequence: Synthetic peptide
DYYA

SEQ ID NO: 6251 - protein, 4 aa, Artificial Sequence
  Description of Artificial Sequence: Synthetic peptide
SYYA

SEQ ID NO: 6252 - protein, 4 aa, Artificial Sequence
  Description of Artificial Sequence: Synthetic peptide
FYYD

SEQ ID NO: 6253 - protein, 4 aa, Artificial Sequence
  Description of Artificial Sequence: Synthetic peptide
FYYA

SEQ ID NO: 6254 - protein, 4 aa, Artificial Sequence
  Description of Artificial Sequence: Synthetic peptide
PYYA

SEQ ID NO: 6255 - protein, 4 aa, Artificial Sequence
  Description of Artificial Sequence: Synthetic peptide
AYYA

SEQ ID NO: 6256 - protein, 4 aa, Artificial Sequence
  Description of Artificial Sequence: Synthetic peptide
HYYD

SEQ ID NO: 6257 - protein, 4 aa, Artificial Sequence
  Description of Artificial Sequence: Synthetic peptide
NYYA

SEQ ID NO: 6258 - protein, 4 aa, Artificial Sequence
  Description of Artificial Sequence: Synthetic peptide
TYYD

SEQ ID NO: 6259 - protein, 4 aa, Artificial Sequence
  Description of Artificial Sequence: Synthetic peptide
NYYD

SEQ ID NO: 6260 - protein, 4 aa, Artificial Sequence
  Description of Artificial Sequence: Synthetic peptide
GYGY

SEQ ID NO: 6261 - protein, 4 aa, Artificial Sequence
  Description of Artificial Sequence: Synthetic peptide
LYGY

SEQ ID NO: 6262 - protein, 4 aa, Artificial Sequence
  Description of Artificial Sequence: Synthetic peptide
RYGY

SEQ ID NO: 6263 - protein, 4 aa, Artificial Sequence
  Description of Artificial Sequence: Synthetic peptide
TYGY

SEQ ID NO: 6264 - protein, 4 aa, Artificial Sequence
  Description of Artificial Sequence: Synthetic peptide
TSGY

SEQ ID NO: 6265 - protein, 4 aa, Artificial Sequence
  Description of Artificial Sequence: Synthetic peptide
VYGY

SEQ ID NO: 6266 - protein, 4 aa, Artificial Sequence
  Description of Artificial Sequence: Synthetic peptide
ISGY

SEQ ID NO: 6267 - protein, 4 aa, Artificial Sequence
  Description of Artificial Sequence: Synthetic peptide
ASGY

SEQ ID NO: 6268 - protein, 4 aa, Artificial Sequence
  Description of Artificial Sequence: Synthetic peptide
PSGY

SEQ ID NO: 6269 - protein, 4 aa, Artificial Sequence
  Description of Artificial Sequence: Synthetic peptide
RSGY

SEQ ID NO: 6270 - protein, 4 aa, Artificial Sequence
  Description of Artificial Sequence: Synthetic peptide
GAGY

SEQ ID NO: 6271 - protein, 4 aa, Artificial Sequence
  Description of Artificial Sequence: Synthetic peptide
AAGY

SEQ ID NO: 6272 - protein, 4 aa, Artificial Sequence
  Description of Artificial Sequence: Synthetic peptide
LSGY

SEQ ID NO: 6273 - protein, 4 aa, Artificial Sequence
  Description of Artificial Sequence: Synthetic peptide
VSGY

SEQ ID NO: 6274 - protein, 4 aa, Artificial Sequence
  Description of Artificial Sequence: Synthetic peptide
VAGY

SEQ ID NO: 6275 - protein, 4 aa, Artificial Sequence
  Description of Artificial Sequence: Synthetic peptide
TAGY

SEQ ID NO: 6276 - protein, 4 aa, Artificial Sequence
  Description of Artificial Sequence: Synthetic peptide
PAGY

SEQ ID NO: 6277 - protein, 4 aa, Artificial Sequence
  Description of Artificial Sequence: Synthetic peptide
SAGY

SEQ ID NO: 6278 - protein, 4 aa, Artificial Sequence
  Description of Artificial Sequence: Synthetic peptide
RAGY

SEQ ID NO: 6279 - protein, 4 aa, Artificial Sequence
  Description of Artificial Sequence: Synthetic peptide
IAGY

SEQ ID NO: 6280 - protein, 4 aa, Artificial Sequence
  Description of Artificial Sequence: Synthetic peptide
AYGY

SEQ ID NO: 6281 - protein, 4 aa, Artificial Sequence
  Description of Artificial Sequence: Synthetic peptide
PYGY

SEQ ID NO: 6282 - protein, 4 aa, Artificial Sequence
  Description of Artificial Sequence: Synthetic peptide
LAGY

SEQ ID NO: 6283 - protein, 4 aa, Artificial Sequence
  Description of Artificial Sequence: Synthetic peptide
IYGY

SEQ ID NO: 6284 - protein, 4 aa, Artificial Sequence
  Description of Artificial Sequence: Synthetic peptide
GSGY

SEQ ID NO: 6285 - protein, 4 aa, Artificial Sequence
  Description of Artificial Sequence: Synthetic peptide
LQLL

SEQ ID NO: 6286 - protein, 4 aa, Artificial Sequence
  Description of Artificial Sequence: Synthetic peptide
AQLW

SEQ ID NO: 6287 - protein, 4 aa, Artificial Sequence
  Description of Artificial Sequence: Synthetic peptide
TQLW

SEQ ID NO: 6288 - protein, 4 aa, Artificial Sequence
  Description of Artificial Sequence: Synthetic peptide
QQLL

SEQ ID NO: 6289 - protein, 4 aa, Artificial Sequence
  Description of Artificial Sequence: Synthetic peptide
EQLL

SEQ ID NO: 6290 - protein, 4 aa, Artificial Sequence
  Description of Artificial Sequence: Synthetic peptide
QQLW

SEQ ID NO: 6291 - protein, 4 aa, Artificial Sequence
  Description of Artificial Sequence: Synthetic peptide
IQLL

SEQ ID NO: 6292 - protein, 4 aa, Artificial Sequence
  Description of Artificial Sequence: Synthetic peptide
EQLW

SEQ ID NO: 6293 - protein, 4 aa, Artificial Sequence
  Description of Artificial Sequence: Synthetic peptide
VQLW

SEQ ID NO: 6294 - protein, 4 aa, Artificial Sequence
  Description of Artificial Sequence: Synthetic peptide
KQLW

SEQ ID NO: 6295 - protein, 4 aa, Artificial Sequence
  Description of Artificial Sequence: Synthetic peptide
KQLL

SEQ ID NO: 6296 - protein, 4 aa, Artificial Sequence
  Description of Artificial Sequence: Synthetic peptide
PQLW

SEQ ID NO: 6297 - protein, 4 aa, Artificial Sequence
  Description of Artificial Sequence: Synthetic peptide
VQLL

SEQ ID NO: 6298 - protein, 4 aa, Artificial Sequence
  Description of Artificial Sequence: Synthetic peptide
TQLL

SEQ ID NO: 6299 - protein, 4 aa, Artificial Sequence
  Description of Artificial Sequence: Synthetic peptide
PQLL

SEQ ID NO: 6300 - protein, 4 aa, Artificial Sequence
  Description of Artificial Sequence: Synthetic peptide
LQLW

SEQ ID NO: 6301 - protein, 4 aa, Artificial Sequence
  Description of Artificial Sequence: Synthetic peptide
AQLL

SEQ ID NO: 6302 - protein, 4 aa, Artificial Sequence
  Description of Artificial Sequence: Synthetic peptide
LGVA

SEQ ID NO: 6303 - protein, 4 aa, Artificial Sequence
  Description of Artificial Sequence: Synthetic peptide
LGGA

SEQ ID NO: 6304 - protein, 4 aa, Artificial Sequence
  Description of Artificial Sequence: Synthetic peptide
KGIA

SEQ ID NO: 6305 - protein, 4 aa, Artificial Sequence
  Description of Artificial Sequence: Synthetic peptide
KGSA

SEQ ID NO: 6306 - protein, 4 aa, Artificial Sequence
  Description of Artificial Sequence: Synthetic peptide
VGIA

SEQ ID NO: 6307 - protein, 4 aa, Artificial Sequence
  Description of Artificial Sequence: Synthetic peptide
KGGA

SEQ ID NO: 6308 - protein, 4 aa, Artificial Sequence
  Description of Artificial Sequence: Synthetic peptide
MGGA

SEQ ID NO: 6309 - protein, 4 aa, Artificial Sequence
  Description of Artificial Sequence: Synthetic peptide
TGGA

SEQ ID NO: 6310 - protein, 4 aa, Artificial Sequence
  Description of Artificial Sequence: Synthetic peptide
QGSA

SEQ ID NO: 6311 - protein, 4 aa, Artificial Sequence
  Description of Artificial Sequence: Synthetic peptide
QGIA

SEQ ID NO: 6312 - protein, 4 aa, Artificial Sequence
  Description of Artificial Sequence: Synthetic peptide
EGSA

SEQ ID NO: 6313 - protein, 4 aa, Artificial Sequence
  Description of Artificial Sequence: Synthetic peptide
PGVA

SEQ ID NO: 6314 - protein, 4 aa, Artificial Sequence
  Description of Artificial Sequence: Synthetic peptide
QGVA

SEQ ID NO: 6315 - protein, 4 aa, Artificial Sequence
  Description of Artificial Sequence: Synthetic peptide
EGIA

SEQ ID NO: 6316 - protein, 4 aa, Artificial Sequence
  Description of Artificial Sequence: Synthetic peptide
AGVA

SEQ ID NO: 6317 - protein, 4 aa, Artificial Sequence
  Description of Artificial Sequence: Synthetic peptide
MGVA

SEQ ID NO: 6318 - protein, 4 aa, Artificial Sequence
  Description of Artificial Sequence: Synthetic peptide
PGIA

SEQ ID NO: 6319 - protein, 4 aa, Artificial Sequence
  Description of Artificial Sequence: Synthetic peptide
AGGA

SEQ ID NO: 6320 - protein, 4 aa, Artificial Sequence
  Description of Artificial Sequence: Synthetic peptide
VGGA

SEQ ID NO: 6321 - protein, 4 aa, Artificial Sequence
  Description of Artificial Sequence: Synthetic peptide
EGVA

SEQ ID NO: 6322 - protein, 4 aa, Artificial Sequence
  Description of Artificial Sequence: Synthetic peptide
PGGA

SEQ ID NO: 6323 - protein, 4 aa, Artificial Sequence
  Description of Artificial Sequence: Synthetic peptide
QGGA

SEQ ID NO: 6324 - protein, 4 aa, Artificial Sequence
  Description of Artificial Sequence: Synthetic peptide
AGIA

SEQ ID NO: 6325 - protein, 4 aa, Artificial Sequence
  Description of Artificial Sequence: Synthetic peptide
LGIA

SEQ ID NO: 6326 - protein, 4 aa, Artificial Sequence
  Description of Artificial Sequence: Synthetic peptide
MGIA

SEQ ID NO: 6327 - protein, 4 aa, Artificial Sequence
  Description of Artificial Sequence: Synthetic peptide
TGSA

SEQ ID NO: 6328 - protein, 4 aa, Artificial Sequence
  Description of Artificial Sequence: Synthetic peptide
TGIA

SEQ ID NO: 6329 - protein, 4 aa, Artificial Sequence
  Description of Artificial Sequence: Synthetic peptide
MGSA

SEQ ID NO: 6330 - protein, 4 aa, Artificial Sequence
  Description of Artificial Sequence: Synthetic peptide
KGVA

SEQ ID NO: 6331 - protein, 4 aa, Artificial Sequence
  Description of Artificial Sequence: Synthetic peptide
TGVA

SEQ ID NO: 6332 - protein, 4 aa, Artificial Sequence
  Description of Artificial Sequence: Synthetic peptide
VGVA

SEQ ID NO: 6333 - protein, 4 aa, Artificial Sequence
  Description of Artificial Sequence: Synthetic peptide
PFGE

SEQ ID NO: 6334 - protein, 4 aa, Artificial Sequence
  Description of Artificial Sequence: Synthetic peptide
VVGE

SEQ ID NO: 6335 - protein, 4 aa, Artificial Sequence
  Description of Artificial Sequence: Synthetic peptide
ALGE

SEQ ID NO: 6336 - protein, 4 aa, Artificial Sequence
  Description of Artificial Sequence: Synthetic peptide
IFGE

SEQ ID NO: 6337 - protein, 4 aa, Artificial Sequence
  Description of Artificial Sequence: Synthetic peptide
PLGE

SEQ ID NO: 6338 - protein, 4 aa, Artificial Sequence
  Description of Artificial Sequence: Synthetic peptide
ILGE

SEQ ID NO: 6339 - protein, 4 aa, Artificial Sequence
  Description of Artificial Sequence: Synthetic peptide
PVGE

SEQ ID NO: 6340 - protein, 4 aa, Artificial Sequence
  Description of Artificial Sequence: Synthetic peptide
RVGE

SEQ ID NO: 6341 - protein, 4 aa, Artificial Sequence
  Description of Artificial Sequence: Synthetic peptide
LLGE

SEQ ID NO: 6342 - protein, 4 aa, Artificial Sequence
  Description of Artificial Sequence: Synthetic peptide
SVGE

SEQ ID NO: 6343 - protein, 4 aa, Artificial Sequence
  Description of Artificial Sequence: Synthetic peptide
GLGE

SEQ ID NO: 6344 - protein, 4 aa, Artificial Sequence
  Description of Artificial Sequence: Synthetic peptide
IVGE

SEQ ID NO: 6345 - protein, 4 aa, Artificial Sequence
  Description of Artificial Sequence: Synthetic peptide
LVGE

SEQ ID NO: 6346 - protein, 4 aa, Artificial Sequence
  Description of Artificial Sequence: Synthetic peptide
SLGE

SEQ ID NO: 6347 - protein, 4 aa, Artificial Sequence
  Description of Artificial Sequence: Synthetic peptide
TLGE

SEQ ID NO: 6348 - protein, 4 aa, Artificial Sequence
  Description of Artificial Sequence: Synthetic peptide
VLGE

SEQ ID NO: 6349 - protein, 4 aa, Artificial Sequence
  Description of Artificial Sequence: Synthetic peptide
TVGE

SEQ ID NO: 6350 - protein, 4 aa, Artificial Sequence
  Description of Artificial Sequence: Synthetic peptide
GVGE

SEQ ID NO: 6351 - protein, 4 aa, Artificial Sequence
  Description of Artificial Sequence: Synthetic peptide
AVGE

SEQ ID NO: 6352 - protein, 4 aa, Artificial Sequence
  Description of Artificial Sequence: Synthetic peptide
PYSY

SEQ ID NO: 6353 - protein, 4 aa, Artificial Sequence
  Description of Artificial Sequence: Synthetic peptide
PYSD

SEQ ID NO: 6354 - protein, 4 aa, Artificial Sequence
  Description of Artificial Sequence: Synthetic peptide
DYSD

SEQ ID NO: 6355 - protein, 4 aa, Artificial Sequence
  Description of Artificial Sequence: Synthetic peptide
DYSA

SEQ ID NO: 6356 - protein, 4 aa, Artificial Sequence
  Description of Artificial Sequence: Synthetic peptide
SYSD

SEQ ID NO: 6357 - protein, 4 aa, Artificial Sequence
  Description of Artificial Sequence: Synthetic peptide
FYSY

SEQ ID NO: 6358 - protein, 4 aa, Artificial Sequence
  Description of Artificial Sequence: Synthetic peptide
VYSY

SEQ ID NO: 6359 - protein, 4 aa, Artificial Sequence
  Description of Artificial Sequence: Synthetic peptide
FYSS

SEQ ID NO: 6360 - protein, 4 aa, Artificial Sequence
  Description of Artificial Sequence: Synthetic peptide
SYSS

SEQ ID NO: 6361 - protein, 4 aa, Artificial Sequence
  Description of Artificial Sequence: Synthetic peptide
YYSS

SEQ ID NO: 6362 - protein, 4 aa, Artificial Sequence
  Description of Artificial Sequence: Synthetic peptide
YYSY

SEQ ID NO: 6363 - protein, 4 aa, Artificial Sequence
  Description of Artificial Sequence: Synthetic peptide
AYSY

SEQ ID NO: 6364 - protein, 4 aa, Artificial Sequence
  Description of Artificial Sequence: Synthetic peptide
AYSD

SEQ ID NO: 6365 - protein, 4 aa, Artificial Sequence
  Description of Artificial Sequence: Synthetic peptide
HYSY

SEQ ID NO: 6366 - protein, 4 aa, Artificial Sequence
  Description of Artificial Sequence: Synthetic peptide
VYSD

SEQ ID NO: 6367 - protein, 4 aa, Artificial Sequence
  Description of Artificial Sequence: Synthetic peptide
FYSA

SEQ ID NO: 6368 - protein, 4 aa, Artificial Sequence
  Description of Artificial Sequence: Synthetic peptide
SYSY

SEQ ID NO: 6369 - protein, 4 aa, Artificial Sequence
  Description of Artificial Sequence: Synthetic peptide
SYSA

SEQ ID NO: 6370 - protein, 4 aa, Artificial Sequence
  Description of Artificial Sequence: Synthetic peptide
FYSD

SEQ ID NO: 6371 - protein, 4 aa, Artificial Sequence
  Description of Artificial Sequence: Synthetic peptide
YYSD

SEQ ID NO: 6372 - protein, 4 aa, Artificial Sequence
  Description of Artificial Sequence: Synthetic peptide
LYSY

SEQ ID NO: 6373 - protein, 4 aa, Artificial Sequence
  Description of Artificial Sequence: Synthetic peptide
YYSA

SEQ ID NO: 6374 - protein, 4 aa, Artificial Sequence
  Description of Artificial Sequence: Synthetic peptide
HYSS

SEQ ID NO: 6375 - protein, 4 aa, Artificial Sequence
  Description of Artificial Sequence: Synthetic peptide
DYSS

SEQ ID NO: 6376 - protein, 4 aa, Artificial Sequence
  Description of Artificial Sequence: Synthetic peptide
HYSA

SEQ ID NO: 6377 - protein, 4 aa, Artificial Sequence
  Description of Artificial Sequence: Synthetic peptide
DYSY

SEQ ID NO: 6378 - protein, 4 aa, Artificial Sequence
  Description of Artificial Sequence: Synthetic peptide
HYSD

SEQ ID NO: 6379 - protein, 4 aa, Artificial Sequence
  Description of Artificial Sequence: Synthetic peptide
LYSD

SEQ ID NO: 6380 - protein, 4 aa, Artificial Sequence
  Description of Artificial Sequence: Synthetic peptide
AVPA

SEQ ID NO: 6381 - protein, 4 aa, Artificial Sequence
  Description of Artificial Sequence: Synthetic peptide
AVRA

SEQ ID NO: 6382 - protein, 4 aa, Artificial Sequence
  Description of Artificial Sequence: Synthetic peptide
PVRA

SEQ ID NO: 6383 - protein, 4 aa, Artificial Sequence
  Description of Artificial Sequence: Synthetic peptide
PVPA

SEQ ID NO: 6384 - protein, 4 aa, Artificial Sequence
  Description of Artificial Sequence: Synthetic peptide
EVPA

SEQ ID NO: 6385 - protein, 4 aa, Artificial Sequence
  Description of Artificial Sequence: Synthetic peptide
LVGA

SEQ ID NO: 6386 - protein, 4 aa, Artificial Sequence
  Description of Artificial Sequence: Synthetic peptide
IVRA

SEQ ID NO: 6387 - protein, 4 aa, Artificial Sequence
  Description of Artificial Sequence: Synthetic peptide
QVGA

SEQ ID NO: 6388 - protein, 4 aa, Artificial Sequence
  Description of Artificial Sequence: Synthetic peptide
IVPA

SEQ ID NO: 6389 - protein, 4 aa, Artificial Sequence
  Description of Artificial Sequence: Synthetic peptide
EVGA

SEQ ID NO: 6390 - protein, 4 aa, Artificial Sequence
  Description of Artificial Sequence: Synthetic peptide
LVPA

SEQ ID NO: 6391 - protein, 4 aa, Artificial Sequence
  Description of Artificial Sequence: Synthetic peptide
QVPA

SEQ ID NO: 6392 - protein, 4 aa, Artificial Sequence
  Description of Artificial Sequence: Synthetic peptide
AVGA

SEQ ID NO: 6393 - protein, 4 aa, Artificial Sequence
  Description of Artificial Sequence: Synthetic peptide
QVRA

SEQ ID NO: 6394 - protein, 4 aa, Artificial Sequence
  Description of Artificial Sequence: Synthetic peptide
TVRA

SEQ ID NO: 6395 - protein, 4 aa, Artificial Sequence
  Description of Artificial Sequence: Synthetic peptide
KVGA

SEQ ID NO: 6396 - protein, 4 aa, Artificial Sequence
  Description of Artificial Sequence: Synthetic peptide
VVGA

SEQ ID NO: 6397 - protein, 4 aa, Artificial Sequence
  Description of Artificial Sequence: Synthetic peptide
EVRA

SEQ ID NO: 6398 - protein, 4 aa, Artificial Sequence
  Description of Artificial Sequence: Synthetic peptide
LVRA

SEQ ID NO: 6399 - protein, 4 aa, Artificial Sequence
  Description of Artificial Sequence: Synthetic peptide
VVRA

SEQ ID NO: 6400 - protein, 4 aa, Artificial Sequence
  Description of Artificial Sequence: Synthetic peptide
PVGA

SEQ ID NO: 6401 - protein, 4 aa, Artificial Sequence
  Description of Artificial Sequence: Synthetic peptide
TVGA

SEQ ID NO: 6402 - protein, 4 aa, Artificial Sequence
  Description of Artificial Sequence: Synthetic peptide
KVRA

SEQ ID NO: 6403 - protein, 4 aa, Artificial Sequence
  Description of Artificial Sequence: Synthetic peptide
KVPA

SEQ ID NO: 6404 - protein, 4 aa, Artificial Sequence
  Description of Artificial Sequence: Synthetic peptide
TVPA

SEQ ID NO: 6405 - protein, 4 aa, Artificial Sequence
  Description of Artificial Sequence: Synthetic peptide
GRGV

SEQ ID NO: 6406 - protein, 4 aa, Artificial Sequence
  Description of Artificial Sequence: Synthetic peptide
SRGV

SEQ ID NO: 6407 - protein, 4 aa, Artificial Sequence
  Description of Artificial Sequence: Synthetic peptide
ILGV

SEQ ID NO: 6408 - protein, 4 aa, Artificial Sequence
  Description of Artificial Sequence: Synthetic peptide
AQGV

SEQ ID NO: 6409 - protein, 4 aa, Artificial Sequence
  Description of Artificial Sequence: Synthetic peptide
TQGV

SEQ ID NO: 6410 - protein, 4 aa, Artificial Sequence
  Description of Artificial Sequence: Synthetic peptide
PQGV

SEQ ID NO: 6411 - protein, 4 aa, Artificial Sequence
  Description of Artificial Sequence: Synthetic peptide
SQGV

SEQ ID NO: 6412 - protein, 4 aa, Artificial Sequence
  Description of Artificial Sequence: Synthetic peptide
RRGV

SEQ ID NO: 6413 - protein, 4 aa, Artificial Sequence
  Description of Artificial Sequence: Synthetic peptide
PLGV

SEQ ID NO: 6414 - protein, 4 aa, Artificial Sequence
  Description of Artificial Sequence: Synthetic peptide
PRGV

SEQ ID NO: 6415 - protein, 4 aa, Artificial Sequence
  Description of Artificial Sequence: Synthetic peptide
IRGV

SEQ ID NO: 6416 - protein, 4 aa, Artificial Sequence
  Description of Artificial Sequence: Synthetic peptide
ALGV

SEQ ID NO: 6417 - protein, 4 aa, Artificial Sequence
  Description of Artificial Sequence: Synthetic peptide
TRGV

SEQ ID NO: 6418 - protein, 4 aa, Artificial Sequence
  Description of Artificial Sequence: Synthetic peptide
TLGV

SEQ ID NO: 6419 - protein, 4 aa, Artificial Sequence
  Description of Artificial Sequence: Synthetic peptide
GQGV

SEQ ID NO: 6420 - protein, 4 aa, Artificial Sequence
  Description of Artificial Sequence: Synthetic peptide
RQGV

SEQ ID NO: 6421 - protein, 4 aa, Artificial Sequence
  Description of Artificial Sequence: Synthetic peptide
RLGV

SEQ ID NO: 6422 - protein, 4 aa, Artificial Sequence
  Description of Artificial Sequence: Synthetic peptide
LRGV

SEQ ID NO: 6423 - protein, 4 aa, Artificial Sequence
  Description of Artificial Sequence: Synthetic peptide
SLGV

SEQ ID NO: 6424 - protein, 4 aa, Artificial Sequence
  Description of Artificial Sequence: Synthetic peptide
VLGV

SEQ ID NO: 6425 - protein, 4 aa, Artificial Sequence
  Description of Artificial Sequence: Synthetic peptide
IQGV

SEQ ID NO: 6426 - protein, 4 aa, Artificial Sequence
  Description of Artificial Sequence: Synthetic peptide
LLGV

SEQ ID NO: 6427 - protein, 4 aa, Artificial Sequence
  Description of Artificial Sequence: Synthetic peptide
LQGV

SEQ ID NO: 6428 - protein, 4 aa, Artificial Sequence
  Description of Artificial Sequence: Synthetic peptide
GLGV

SEQ ID NO: 6429 - protein, 4 aa, Artificial Sequence
  Description of Artificial Sequence: Synthetic peptide
DSSW

SEQ ID NO: 6430 - protein, 4 aa, Artificial Sequence
  Description of Artificial Sequence: Synthetic peptide
DSSR

SEQ ID NO: 6431 - protein, 4 aa, Artificial Sequence
  Description of Artificial Sequence: Synthetic peptide
DSSV

SEQ ID NO: 6432 - protein, 4 aa, Artificial Sequence
  Description of Artificial Sequence: Synthetic peptide
DSST

SEQ ID NO: 6433 - protein, 4 aa, Artificial Sequence
  Description of Artificial Sequence: Synthetic peptide
DSSM

SEQ ID NO: 6434 - protein, 4 aa, Artificial Sequence
  Description of Artificial Sequence: Synthetic peptide
DSSA

SEQ ID NO: 6435 - protein, 4 aa, Artificial Sequence
  Description of Artificial Sequence: Synthetic peptide
DSSS

SEQ ID NO: 6436 - protein, 4 aa, Artificial Sequence
  Description of Artificial Sequence: Synthetic peptide
DSSL

SEQ ID NO: 6437 - protein, 4 aa, Artificial Sequence
  Description of Artificial Sequence: Synthetic peptide
TGYS

SEQ ID NO: 6438 - protein, 4 aa, Artificial Sequence
  Description of Artificial Sequence: Synthetic peptide
SDYS

SEQ ID NO: 6439 - protein, 4 aa, Artificial Sequence
  Description of Artificial Sequence: Synthetic peptide
IAYS

SEQ ID NO: 6440 - protein, 4 aa, Artificial Sequence
  Description of Artificial Sequence: Synthetic peptide
VDYS

SEQ ID NO: 6441 - protein, 4 aa, Artificial Sequence
  Description of Artificial Sequence: Synthetic peptide
LDYS

SEQ ID NO: 6442 - protein, 4 aa, Artificial Sequence
  Description of Artificial Sequence: Synthetic peptide
PDYS

SEQ ID NO: 6443 - protein, 4 aa, Artificial Sequence
  Description of Artificial Sequence: Synthetic peptide
SAYS

SEQ ID NO: 6444 - protein, 4 aa, Artificial Sequence
  Description of Artificial Sequence: Synthetic peptide
TDYS

SEQ ID NO: 6445 - protein, 4 aa, Artificial Sequence
  Description of Artificial Sequence: Synthetic peptide
LAYS

SEQ ID NO: 6446 - protein, 4 aa, Artificial Sequence
  Description of Artificial Sequence: Synthetic peptide
GAYS

SEQ ID NO: 6447 - protein, 4 aa, Artificial Sequence
  Description of Artificial Sequence: Synthetic peptide
GDYS

SEQ ID NO: 6448 - protein, 4 aa, Artificial Sequence
  Description of Artificial Sequence: Synthetic peptide
VAYS

SEQ ID NO: 6449 - protein, 4 aa, Artificial Sequence
  Description of Artificial Sequence: Synthetic peptide
RDYS

SEQ ID NO: 6450 - protein, 4 aa, Artificial Sequence
  Description of Artificial Sequence: Synthetic peptide
IDYS

SEQ ID NO: 6451 - protein, 4 aa, Artificial Sequence
  Description of Artificial Sequence: Synthetic peptide
RAYS

SEQ ID NO: 6452 - protein, 4 aa, Artificial Sequence
  Description of Artificial Sequence: Synthetic peptide
PAYS

SEQ ID NO: 6453 - protein, 4 aa, Artificial Sequence
  Description of Artificial Sequence: Synthetic peptide
ADYS

SEQ ID NO: 6454 - protein, 4 aa, Artificial Sequence
  Description of Artificial Sequence: Synthetic peptide
TAYS

SEQ ID NO: 6455 - protein, 4 aa, Artificial Sequence
  Description of Artificial Sequence: Synthetic peptide
IGYS

SEQ ID NO: 6456 - protein, 4 aa, Artificial Sequence
  Description of Artificial Sequence: Synthetic peptide
GGYS

SEQ ID NO: 6457 - protein, 4 aa, Artificial Sequence
  Description of Artificial Sequence: Synthetic peptide
RGYS

SEQ ID NO: 6458 - protein, 4 aa, Artificial Sequence
  Description of Artificial Sequence: Synthetic peptide
AAYS

SEQ ID NO: 6459 - protein, 4 aa, Artificial Sequence
  Description of Artificial Sequence: Synthetic peptide
LYGS

SEQ ID NO: 6460 - protein, 4 aa, Artificial Sequence
  Description of Artificial Sequence: Synthetic peptide
TYGS

SEQ ID NO: 6461 - protein, 4 aa, Artificial Sequence
  Description of Artificial Sequence: Synthetic peptide
DYGS

SEQ ID NO: 6462 - protein, 4 aa, Artificial Sequence
  Description of Artificial Sequence: Synthetic peptide
SYGS

SEQ ID NO: 6463 - protein, 4 aa, Artificial Sequence
  Description of Artificial Sequence: Synthetic peptide
FYGS

SEQ ID NO: 6464 - protein, 4 aa, Artificial Sequence
  Description of Artificial Sequence: Synthetic peptide
NYGS

SEQ ID NO: 6465 - protein, 4 aa, Artificial Sequence
  Description of Artificial Sequence: Synthetic peptide
HYGS

SEQ ID NO: 6466 - protein, 4 aa, Artificial Sequence
  Description of Artificial Sequence: Synthetic peptide
VYGS

SEQ ID NO: 6467 - protein, 4 aa, Artificial Sequence
  Description of Artificial Sequence: Synthetic peptide
AYGS

SEQ ID NO: 6468 - protein, 4 aa, Artificial Sequence
  Description of Artificial Sequence: Synthetic peptide
PYGS

SEQ ID NO: 6469 - protein, 4 aa, Artificial Sequence
  Description of Artificial Sequence: Synthetic peptide
IYGS

SEQ ID NO: 6470 - protein, 4 aa, Artificial Sequence
  Description of Artificial Sequence: Synthetic peptide
YYYS

SEQ ID NO: 6471 - protein, 4 aa, Artificial Sequence
  Description of Artificial Sequence: Synthetic peptide
SYYS

SEQ ID NO: 6472 - protein, 4 aa, Artificial Sequence
  Description of Artificial Sequence: Synthetic peptide
YYYY

SEQ ID NO: 6473 - protein, 4 aa, Artificial Sequence
  Description of Artificial Sequence: Synthetic peptide
PYYF

SEQ ID NO: 6474 - protein, 4 aa, Artificial Sequence
  Description of Artificial Sequence: Synthetic peptide
FYYS

SEQ ID NO: 6475 - protein, 4 aa, Artificial Sequence
  Description of Artificial Sequence: Synthetic peptide
NYYS

SEQ ID NO: 6476 - protein, 4 aa, Artificial Sequence
  Description of Artificial Sequence: Synthetic peptide
NYYF

SEQ ID NO: 6477 - protein, 4 aa, Artificial Sequence
  Description of Artificial Sequence: Synthetic peptide
FYYF

SEQ ID NO: 6478 - protein, 4 aa, Artificial Sequence
  Description of Artificial Sequence: Synthetic peptide
FYYY

SEQ ID NO: 6479 - protein, 4 aa, Artificial Sequence
  Description of Artificial Sequence: Synthetic peptide
AYYY

SEQ ID NO: 6480 - protein, 4 aa, Artificial Sequence
  Description of Artificial Sequence: Synthetic peptide
SYYY

SEQ ID NO: 6481 - protein, 4 aa, Artificial Sequence
  Description of Artificial Sequence: Synthetic peptide
DYYY

SEQ ID NO: 6482 - protein, 4 aa, Artificial Sequence
  Description of Artificial Sequence: Synthetic peptide
AYYS

SEQ ID NO: 6483 - protein, 4 aa, Artificial Sequence
  Description of Artificial Sequence: Synthetic peptide
IYYY

SEQ ID NO: 6484 - protein, 4 aa, Artificial Sequence
  Description of Artificial Sequence: Synthetic peptide
LYYY

SEQ ID NO: 6485 - protein, 4 aa, Artificial Sequence
  Description of Artificial Sequence: Synthetic peptide
DYYS

SEQ ID NO: 6486 - protein, 4 aa, Artificial Sequence
  Description of Artificial Sequence: Synthetic peptide
AYYF

SEQ ID NO: 6487 - protein, 4 aa, Artificial Sequence
  Description of Artificial Sequence: Synthetic peptide
PYYS

SEQ ID NO: 6488 - protein, 4 aa, Artificial Sequence
  Description of Artificial Sequence: Synthetic peptide
IYYS

SEQ ID NO: 6489 - protein, 4 aa, Artificial Sequence
  Description of Artificial Sequence: Synthetic peptide
YYYF

SEQ ID NO: 6490 - protein, 4 aa, Artificial Sequence
  Description of Artificial Sequence: Synthetic peptide
HYYS

SEQ ID NO: 6491 - protein, 4 aa, Artificial Sequence
  Description of Artificial Sequence: Synthetic peptide
PYYY

SEQ ID NO: 6492 - protein, 4 aa, Artificial Sequence
  Description of Artificial Sequence: Synthetic peptide
HYYF

SEQ ID NO: 6493 - protein, 4 aa, Artificial Sequence
  Description of Artificial Sequence: Synthetic peptide
HYYY

SEQ ID NO: 6494 - protein, 4 aa, Artificial Sequence
  Description of Artificial Sequence: Synthetic peptide
LYYS

SEQ ID NO: 6495 - protein, 4 aa, Artificial Sequence
  Description of Artificial Sequence: Synthetic peptide
VYYF

SEQ ID NO: 6496 - protein, 4 aa, Artificial Sequence
  Description of Artificial Sequence: Synthetic peptide
SYYF

SEQ ID NO: 6497 - protein, 4 aa, Artificial Sequence
  Description of Artificial Sequence: Synthetic peptide
IYYF

SEQ ID NO: 6498 - protein, 4 aa, Artificial Sequence
  Description of Artificial Sequence: Synthetic peptide
LYYF

SEQ ID NO: 6499 - protein, 4 aa, Artificial Sequence
  Description of Artificial Sequence: Synthetic peptide
DYYF

SEQ ID NO: 6500 - protein, 4 aa, Artificial Sequence
  Description of Artificial Sequence: Synthetic peptide
TYYS

SEQ ID NO: 6501 - protein, 4 aa, Artificial Sequence
  Description of Artificial Sequence: Synthetic peptide
NYYY

SEQ ID NO: 6502 - protein, 4 aa, Artificial Sequence
  Description of Artificial Sequence: Synthetic peptide
TYYF

SEQ ID NO: 6503 - protein, 4 aa, Artificial Sequence
  Description of Artificial Sequence: Synthetic peptide
TYYY

SEQ ID NO: 6504 - protein, 4 aa, Artificial Sequence
  Description of Artificial Sequence: Synthetic peptide
VYYS

SEQ ID NO: 6505 - protein, 4 aa, Artificial Sequence
  Description of Artificial Sequence: Synthetic peptide
VYYY

SEQ ID NO: 6506 - protein, 4 aa, Artificial Sequence
  Description of Artificial Sequence: Synthetic peptide
FSYS

SEQ ID NO: 6507 - protein, 4 aa, Artificial Sequence
  Description of Artificial Sequence: Synthetic peptide
VRYS

SEQ ID NO: 6508 - protein, 4 aa, Artificial Sequence
  Description of Artificial Sequence: Synthetic peptide
YSYS

SEQ ID NO: 6509 - protein, 4 aa, Artificial Sequence
  Description of Artificial Sequence: Synthetic peptide
LRYS

SEQ ID NO: 6510 - protein, 4 aa, Artificial Sequence
  Description of Artificial Sequence: Synthetic peptide
ARYS

SEQ ID NO: 6511 - protein, 4 aa, Artificial Sequence
  Description of Artificial Sequence: Synthetic peptide
FRYS

SEQ ID NO: 6512 - protein, 4 aa, Artificial Sequence
  Description of Artificial Sequence: Synthetic peptide
SRYS

SEQ ID NO: 6513 - protein, 4 aa, Artificial Sequence
  Description of Artificial Sequence: Synthetic peptide
DSYS

SEQ ID NO: 6514 - protein, 4 aa, Artificial Sequence
  Description of Artificial Sequence: Synthetic peptide
LSYS

SEQ ID NO: 6515 - protein, 4 aa, Artificial Sequence
  Description of Artificial Sequence: Synthetic peptide
HRYS

SEQ ID NO: 6516 - protein, 4 aa, Artificial Sequence
  Description of Artificial Sequence: Synthetic peptide
PSYS

SEQ ID NO: 6517 - protein, 4 aa, Artificial Sequence
  Description of Artificial Sequence: Synthetic peptide
HSYS

SEQ ID NO: 6518 - protein, 4 aa, Artificial Sequence
  Description of Artificial Sequence: Synthetic peptide
ASYS

SEQ ID NO: 6519 - protein, 4 aa, Artificial Sequence
  Description of Artificial Sequence: Synthetic peptide
YRYS

SEQ ID NO: 6520 - protein, 4 aa, Artificial Sequence
  Description of Artificial Sequence: Synthetic peptide
SSYS

SEQ ID NO: 6521 - protein, 4 aa, Artificial Sequence
  Description of Artificial Sequence: Synthetic peptide
PRYS

SEQ ID NO: 6522 - protein, 4 aa, Artificial Sequence
  Description of Artificial Sequence: Synthetic peptide
VSYS

SEQ ID NO: 6523 - protein, 4 aa, Artificial Sequence
  Description of Artificial Sequence: Synthetic peptide
DRYS

SEQ ID NO: 6524 - protein, 4 aa, Artificial Sequence
  Description of Artificial Sequence: Synthetic peptide
TWFG

SEQ ID NO: 6525 - protein, 4 aa, Artificial Sequence
  Description of Artificial Sequence: Synthetic peptide
GWFG

SEQ ID NO: 6526 - protein, 4 aa, Artificial Sequence
  Description of Artificial Sequence: Synthetic peptide
RWFG

SEQ ID NO: 6527 - protein, 4 aa, Artificial Sequence
  Description of Artificial Sequence: Synthetic peptide
PWFG

SEQ ID NO: 6528 - protein, 4 aa, Artificial Sequence
  Description of Artificial Sequence: Synthetic peptide
VWFG

SEQ ID NO: 6529 - protein, 4 aa, Artificial Sequence
  Description of Artificial Sequence: Synthetic peptide
SWFG

SEQ ID NO: 6530 - protein, 4 aa, Artificial Sequence
  Description of Artificial Sequence: Synthetic peptide
AWFG

SEQ ID NO: 6531 - protein, 4 aa, Artificial Sequence
  Description of Artificial Sequence: Synthetic peptide
IWFG

SEQ ID NO: 6532 - protein, 4 aa, Artificial Sequence
  Description of Artificial Sequence: Synthetic peptide
RYYY

SEQ ID NO: 6533 - protein, 4 aa, Artificial Sequence
  Description of Artificial Sequence: Synthetic peptide
RYYS

SEQ ID NO: 6534 - protein, 4 aa, Artificial Sequence
  Description of Artificial Sequence: Synthetic peptide
RYYF

SEQ ID NO: 6535 - protein, 4 aa, Artificial Sequence
  Description of Artificial Sequence: Synthetic peptide
GYYF

SEQ ID NO: 6536 - protein, 4 aa, Artificial Sequence
  Description of Artificial Sequence: Synthetic peptide
GYYS

SEQ ID NO: 6537 - protein, 4 aa, Artificial Sequence
  Description of Artificial Sequence: Synthetic peptide
KFGG

SEQ ID NO: 6538 - protein, 4 aa, Artificial Sequence
  Description of Artificial Sequence: Synthetic peptide
ALGG

SEQ ID NO: 6539 - protein, 4 aa, Artificial Sequence
  Description of Artificial Sequence: Synthetic peptide
ILGG

SEQ ID NO: 6540 - protein, 4 aa, Artificial Sequence
  Description of Artificial Sequence: Synthetic peptide
EFGG

SEQ ID NO: 6541 - protein, 4 aa, Artificial Sequence
  Description of Artificial Sequence: Synthetic peptide
QFGG

SEQ ID NO: 6542 - protein, 4 aa, Artificial Sequence
  Description of Artificial Sequence: Synthetic peptide
PLGG

SEQ ID NO: 6543 - protein, 4 aa, Artificial Sequence
  Description of Artificial Sequence: Synthetic peptide
VLGG

SEQ ID NO: 6544 - protein, 4 aa, Artificial Sequence
  Description of Artificial Sequence: Synthetic peptide
IVGG

SEQ ID NO: 6545 - protein, 4 aa, Artificial Sequence
  Description of Artificial Sequence: Synthetic peptide
LLGG

SEQ ID NO: 6546 - protein, 4 aa, Artificial Sequence
  Description of Artificial Sequence: Synthetic peptide
QLGG

SEQ ID NO: 6547 - protein, 4 aa, Artificial Sequence
  Description of Artificial Sequence: Synthetic peptide
KLGG

SEQ ID NO: 6548 - protein, 4 aa, Artificial Sequence
  Description of Artificial Sequence: Synthetic peptide
IFGG

SEQ ID NO: 6549 - protein, 4 aa, Artificial Sequence
  Description of Artificial Sequence: Synthetic peptide
PFGG

SEQ ID NO: 6550 - protein, 4 aa, Artificial Sequence
  Description of Artificial Sequence: Synthetic peptide
TLGG

SEQ ID NO: 6551 - protein, 5 aa, Artificial Sequence
  Description of Artificial Sequence: Synthetic peptide
YMVRD

SEQ ID NO: 6552 - protein, 5 aa, Artificial Sequence
  Description of Artificial Sequence: Synthetic peptide
SMVRG

SEQ ID NO: 6553 - protein, 5 aa, Artificial Sequence
  Description of Artificial Sequence: Synthetic peptide
FMVRD

SEQ ID NO: 6554 - protein, 5 aa, Artificial Sequence
  Description of Artificial Sequence: Synthetic peptide
FMVRA

SEQ ID NO: 6555 - protein, 5 aa, Artificial Sequence
  Description of Artificial Sequence: Synthetic peptide
DMVRA

SEQ ID NO: 6556 - protein, 5 aa, Artificial Sequence
  Description of Artificial Sequence: Synthetic peptide
HMVRG

SEQ ID NO: 6557 - protein, 5 aa, Artificial Sequence
  Description of Artificial Sequence: Synthetic peptide
LMVRG

SEQ ID NO: 6558 - protein, 5 aa, Artificial Sequence
  Description of Artificial Sequence: Synthetic peptide
DMVRD

SEQ ID NO: 6559 - protein, 5 aa, Artificial Sequence
  Description of Artificial Sequence: Synthetic peptide
LMVRA

SEQ ID NO: 6560 - protein, 5 aa, Artificial Sequence
  Description of Artificial Sequence: Synthetic peptide
DMVRG

SEQ ID NO: 6561 - protein, 5 aa, Artificial Sequence
  Description of Artificial Sequence: Synthetic peptide
AMVRA

SEQ ID NO: 6562 - protein, 5 aa, Artificial Sequence
  Description of Artificial Sequence: Synthetic peptide
AMVRD

SEQ ID NO: 6563 - protein, 5 aa, Artificial Sequence
  Description of Artificial Sequence: Synthetic peptide
NMVRA

SEQ ID NO: 6564 - protein, 5 aa, Artificial Sequence
  Description of Artificial Sequence: Synthetic peptide
NMVRG

SEQ ID NO: 6565 - protein, 5 aa, Artificial Sequence
  Description of Artificial Sequence: Synthetic peptide
FMVRG

SEQ ID NO: 6566 - protein, 5 aa, Artificial Sequence
  Description of Artificial Sequence: Synthetic peptide
SMVRD

SEQ ID NO: 6567 - protein, 5 aa, Artificial Sequence
  Description of Artificial Sequence: Synthetic peptide
YMVRA

SEQ ID NO: 6568 - protein, 5 aa, Artificial Sequence
  Description of Artificial Sequence: Synthetic peptide
SMVRA

SEQ ID NO: 6569 - protein, 5 aa, Artificial Sequence
  Description of Artificial Sequence: Synthetic peptide
PMVRD

SEQ ID NO: 6570 - protein, 5 aa, Artificial Sequence
  Description of Artificial Sequence: Synthetic peptide
YMVRG

SEQ ID NO: 6571 - protein, 5 aa, Artificial Sequence
  Description of Artificial Sequence: Synthetic peptide
PMVRA

SEQ ID NO: 6572 - protein, 5 aa, Artificial Sequence
  Description of Artificial Sequence: Synthetic peptide
PMVRG

SEQ ID NO: 6573 - protein, 5 aa, Artificial Sequence
  Description of Artificial Sequence: Synthetic peptide
VMVRA

SEQ ID NO: 6574 - protein, 5 aa, Artificial Sequence
  Description of Artificial Sequence: Synthetic peptide
NMVRD

SEQ ID NO: 6575 - protein, 5 aa, Artificial Sequence
  Description of Artificial Sequence: Synthetic peptide
VMVRG

SEQ ID NO: 6576 - protein, 5 aa, Artificial Sequence
  Description of Artificial Sequence: Synthetic peptide
TMVRD

SEQ ID NO: 6577 - protein, 5 aa, Artificial Sequence
  Description of Artificial Sequence: Synthetic peptide
VMVRD

SEQ ID NO: 6578 - protein, 5 aa, Artificial Sequence
  Description of Artificial Sequence: Synthetic peptide
TMVRA

SEQ ID NO: 6579 - protein, 5 aa, Artificial Sequence
  Description of Artificial Sequence: Synthetic peptide
AMVRG

SEQ ID NO: 6580 - protein, 5 aa, Artificial Sequence
  Description of Artificial Sequence: Synthetic peptide
LMVRD

SEQ ID NO: 6581 - protein, 5 aa, Artificial Sequence
  Description of Artificial Sequence: Synthetic peptide
HMVRD

SEQ ID NO: 6582 - protein, 5 aa, Artificial Sequence
  Description of Artificial Sequence: Synthetic peptide
HMVRA

SEQ ID NO: 6583 - protein, 5 aa, Artificial Sequence
  Description of Artificial Sequence: Synthetic peptide
IMVRD

SEQ ID NO: 6584 - protein, 5 aa, Artificial Sequence
  Description of Artificial Sequence: Synthetic peptide
IMVRA

SEQ ID NO: 6585 - protein, 5 aa, Artificial Sequence
  Description of Artificial Sequence: Synthetic peptide
IMVRG

SEQ ID NO: 6586 - protein, 5 aa, Artificial Sequence
  Description of Artificial Sequence: Synthetic peptide
AYGDF

SEQ ID NO: 6587 - protein, 5 aa, Artificial Sequence
  Description of Artificial Sequence: Synthetic peptide
VYGDS

SEQ ID NO: 6588 - protein, 5 aa, Artificial Sequence
  Description of Artificial Sequence: Synthetic peptide
NYGDF

SEQ ID NO: 6589 - protein, 5 aa, Artificial Sequence
  Description of Artificial Sequence: Synthetic peptide
DYGDS

SEQ ID NO: 6590 - protein, 5 aa, Artificial Sequence
  Description of Artificial Sequence: Synthetic peptide
HYGDS

SEQ ID NO: 6591 - protein, 5 aa, Artificial Sequence
  Description of Artificial Sequence: Synthetic peptide
HYGDY

SEQ ID NO: 6592 - protein, 5 aa, Artificial Sequence
  Description of Artificial Sequence: Synthetic peptide
IYGDS

SEQ ID NO: 6593 - protein, 5 aa, Artificial Sequence
  Description of Artificial Sequence: Synthetic peptide
LYGDS

SEQ ID NO: 6594 - protein, 5 aa, Artificial Sequence
  Description of Artificial Sequence: Synthetic peptide
LYGDF

SEQ ID NO: 6595 - protein, 5 aa, Artificial Sequence
  Description of Artificial Sequence: Synthetic peptide
AYGDY

SEQ ID NO: 6596 - protein, 5 aa, Artificial Sequence
  Description of Artificial Sequence: Synthetic peptide
AYGDS

SEQ ID NO: 6597 - protein, 5 aa, Artificial Sequence
  Description of Artificial Sequence: Synthetic peptide
SYGDS

SEQ ID NO: 6598 - protein, 5 aa, Artificial Sequence
  Description of Artificial Sequence: Synthetic peptide
SYGDY

SEQ ID NO: 6599 - protein, 5 aa, Artificial Sequence
  Description of Artificial Sequence: Synthetic peptide
NYGDS

SEQ ID NO: 6600 - protein, 5 aa, Artificial Sequence
  Description of Artificial Sequence: Synthetic peptide
HYGDF

SEQ ID NO: 6601 - protein, 5 aa, Artificial Sequence
  Description of Artificial Sequence: Synthetic peptide
FYGDS

SEQ ID NO: 6602 - protein, 5 aa, Artificial Sequence
  Description of Artificial Sequence: Synthetic peptide
IYGDF

SEQ ID NO: 6603 - protein, 5 aa, Artificial Sequence
  Description of Artificial Sequence: Synthetic peptide
FYGDY

SEQ ID NO: 6604 - protein, 5 aa, Artificial Sequence
  Description of Artificial Sequence: Synthetic peptide
VYGDY

SEQ ID NO: 6605 - protein, 5 aa, Artificial Sequence
  Description of Artificial Sequence: Synthetic peptide
NYGDY

SEQ ID NO: 6606 - protein, 5 aa, Artificial Sequence
  Description of Artificial Sequence: Synthetic peptide
YYGDS

SEQ ID NO: 6607 - protein, 5 aa, Artificial Sequence
  Description of Artificial Sequence: Synthetic peptide
YYGDF

SEQ ID NO: 6608 - protein, 5 aa, Artificial Sequence
  Description of Artificial Sequence: Synthetic peptide
PYGDY

SEQ ID NO: 6609 - protein, 5 aa, Artificial Sequence
  Description of Artificial Sequence: Synthetic peptide
SYGDF

SEQ ID NO: 6610 - protein, 5 aa, Artificial Sequence
  Description of Artificial Sequence: Synthetic peptide
TYGDS

SEQ ID NO: 6611 - protein, 5 aa, Artificial Sequence
  Description of Artificial Sequence: Synthetic peptide
TYGDY

SEQ ID NO: 6612 - protein, 5 aa, Artificial Sequence
  Description of Artificial Sequence: Synthetic peptide
LYGDY

SEQ ID NO: 6613 - protein, 5 aa, Artificial Sequence
  Description of Artificial Sequence: Synthetic peptide
DYGDF

SEQ ID NO: 6614 - protein, 5 aa, Artificial Sequence
  Description of Artificial Sequence: Synthetic peptide
IYGDY

SEQ ID NO: 6615 - protein, 5 aa, Artificial Sequence
  Description of Artificial Sequence: Synthetic peptide
VYGDF

SEQ ID NO: 6616 - protein, 5 aa, Artificial Sequence
  Description of Artificial Sequence: Synthetic peptide
FYGDF

SEQ ID NO: 6617 - protein, 5 aa, Artificial Sequence
  Description of Artificial Sequence: Synthetic peptide
TYGDF

SEQ ID NO: 6618 - protein, 5 aa, Artificial Sequence
  Description of Artificial Sequence: Synthetic peptide
PYGDF

SEQ ID NO: 6619 - protein, 5 aa, Artificial Sequence
  Description of Artificial Sequence: Synthetic peptide
PYGDS

SEQ ID NO: 6620 - protein, 5 aa, Artificial Sequence
  Description of Artificial Sequence: Synthetic peptide
YYGDY

SEQ ID NO: 6621 - protein, 5 aa, Artificial Sequence
  Description of Artificial Sequence: Synthetic peptide
TYSYD

SEQ ID NO: 6622 - protein, 5 aa, Artificial Sequence
  Description of Artificial Sequence: Synthetic peptide
PYSYG

SEQ ID NO: 6623 - protein, 5 aa, Artificial Sequence
  Description of Artificial Sequence: Synthetic peptide
RYSYD

SEQ ID NO: 6624 - protein, 5 aa, Artificial Sequence
  Description of Artificial Sequence: Synthetic peptide
AYSYV

SEQ ID NO: 6625 - protein, 5 aa, Artificial Sequence
  Description of Artificial Sequence: Synthetic peptide
PYSYA

SEQ ID NO: 6626 - protein, 5 aa, Artificial Sequence
  Description of Artificial Sequence: Synthetic peptide
TYSYV

SEQ ID NO: 6627 - protein, 5 aa, Artificial Sequence
  Description of Artificial Sequence: Synthetic peptide
PYSYD

SEQ ID NO: 6628 - protein, 5 aa, Artificial Sequence
  Description of Artificial Sequence: Synthetic peptide
TYSYG

SEQ ID NO: 6629 - protein, 5 aa, Artificial Sequence
  Description of Artificial Sequence: Synthetic peptide
AYSYD

SEQ ID NO: 6630 - protein, 5 aa, Artificial Sequence
  Description of Artificial Sequence: Synthetic peptide
RYSYA

SEQ ID NO: 6631 - protein, 5 aa, Artificial Sequence
  Description of Artificial Sequence: Synthetic peptide
PYSYV

SEQ ID NO: 6632 - protein, 5 aa, Artificial Sequence
  Description of Artificial Sequence: Synthetic peptide
GYSYA

SEQ ID NO: 6633 - protein, 5 aa, Artificial Sequence
  Description of Artificial Sequence: Synthetic peptide
GYSYD

SEQ ID NO: 6634 - protein, 5 aa, Artificial Sequence
  Description of Artificial Sequence: Synthetic peptide
GYSYV

SEQ ID NO: 6635 - protein, 5 aa, Artificial Sequence
  Description of Artificial Sequence: Synthetic peptide
LYSYG

SEQ ID NO: 6636 - protein, 5 aa, Artificial Sequence
  Description of Artificial Sequence: Synthetic peptide
SYSYV

SEQ ID NO: 6637 - protein, 5 aa, Artificial Sequence
  Description of Artificial Sequence: Synthetic peptide
LYSYA

SEQ ID NO: 6638 - protein, 5 aa, Artificial Sequence
  Description of Artificial Sequence: Synthetic peptide
LYSYD

SEQ ID NO: 6639 - protein, 5 aa, Artificial Sequence
  Description of Artificial Sequence: Synthetic peptide
RYSYV

SEQ ID NO: 6640 - protein, 5 aa, Artificial Sequence
  Description of Artificial Sequence: Synthetic peptide
IYSYD

SEQ ID NO: 6641 - protein, 5 aa, Artificial Sequence
  Description of Artificial Sequence: Synthetic peptide
VYSYV

SEQ ID NO: 6642 - protein, 5 aa, Artificial Sequence
  Description of Artificial Sequence: Synthetic peptide
IYSYG

SEQ ID NO: 6643 - protein, 5 aa, Artificial Sequence
  Description of Artificial Sequence: Synthetic peptide
IYSYA

SEQ ID NO: 6644 - protein, 5 aa, Artificial Sequence
  Description of Artificial Sequence: Synthetic peptide
IYSYV

SEQ ID NO: 6645 - protein, 5 aa, Artificial Sequence
  Description of Artificial Sequence: Synthetic peptide
RYSYG

SEQ ID NO: 6646 - protein, 5 aa, Artificial Sequence
  Description of Artificial Sequence: Synthetic peptide
VYSYA

SEQ ID NO: 6647 - protein, 5 aa, Artificial Sequence
  Description of Artificial Sequence: Synthetic peptide
AYSYA

SEQ ID NO: 6648 - protein, 5 aa, Artificial Sequence
  Description of Artificial Sequence: Synthetic peptide
SYSYA

SEQ ID NO: 6649 - protein, 5 aa, Artificial Sequence
  Description of Artificial Sequence: Synthetic peptide
VYSYG

SEQ ID NO: 6650 - protein, 5 aa, Artificial Sequence
  Description of Artificial Sequence: Synthetic peptide
AYSYG

SEQ ID NO: 6651 - protein, 5 aa, Artificial Sequence
  Description of Artificial Sequence: Synthetic peptide
VYSYD

SEQ ID NO: 6652 - protein, 5 aa, Artificial Sequence
  Description of Artificial Sequence: Synthetic peptide
TYSYA

SEQ ID NO: 6653 - protein, 5 aa, Artificial Sequence
  Description of Artificial Sequence: Synthetic peptide
SYSYD

SEQ ID NO: 6654 - protein, 5 aa, Artificial Sequence
  Description of Artificial Sequence: Synthetic peptide
SYSYG

SEQ ID NO: 6655 - protein, 5 aa, Artificial Sequence
  Description of Artificial Sequence: Synthetic peptide
LYSYV

SEQ ID NO: 6656 - protein, 5 aa, Artificial Sequence
  Description of Artificial Sequence: Synthetic peptide
GSGSS

SEQ ID NO: 6657 - protein, 5 aa, Artificial Sequence
  Description of Artificial Sequence: Synthetic peptide
GSGSF

SEQ ID NO: 6658 - protein, 5 aa, Artificial Sequence
  Description of Artificial Sequence: Synthetic peptide
ASGSS

SEQ ID NO: 6659 - protein, 5 aa, Artificial Sequence
  Description of Artificial Sequence: Synthetic peptide
RSGSY

SEQ ID NO: 6660 - protein, 5 aa, Artificial Sequence
  Description of Artificial Sequence: Synthetic peptide
NSGSY

SEQ ID NO: 6661 - protein, 5 aa, Artificial Sequence
  Description of Artificial Sequence: Synthetic peptide
NSGSS

SEQ ID NO: 6662 - protein, 5 aa, Artificial Sequence
  Description of Artificial Sequence: Synthetic peptide
TSGSS

SEQ ID NO: 6663 - protein, 5 aa, Artificial Sequence
  Description of Artificial Sequence: Synthetic peptide
RSGSS

SEQ ID NO: 6664 - protein, 5 aa, Artificial Sequence
  Description of Artificial Sequence: Synthetic peptide
SSGSY

SEQ ID NO: 6665 - protein, 5 aa, Artificial Sequence
  Description of Artificial Sequence: Synthetic peptide
VSGSF

SEQ ID NO: 6666 - protein, 5 aa, Artificial Sequence
  Description of Artificial Sequence: Synthetic peptide
HSGSY

SEQ ID NO: 6667 - protein, 5 aa, Artificial Sequence
  Description of Artificial Sequence: Synthetic peptide
TSGSY

SEQ ID NO: 6668 - protein, 5 aa, Artificial Sequence
  Description of Artificial Sequence: Synthetic peptide
SSGSF

SEQ ID NO: 6669 - protein, 5 aa, Artificial Sequence
  Description of Artificial Sequence: Synthetic peptide
LSGSF

SEQ ID NO: 6670 - protein, 5 aa, Artificial Sequence
  Description of Artificial Sequence: Synthetic peptide
NSGSF

SEQ ID NO: 6671 - protein, 5 aa, Artificial Sequence
  Description of Artificial Sequence: Synthetic peptide
PSGSY

SEQ ID NO: 6672 - protein, 5 aa, Artificial Sequence
  Description of Artificial Sequence: Synthetic peptide
TSGSF

SEQ ID NO: 6673 - protein, 5 aa, Artificial Sequence
  Description of Artificial Sequence: Synthetic peptide
PSGSS

SEQ ID NO: 6674 - protein, 5 aa, Artificial Sequence
  Description of Artificial Sequence: Synthetic peptide
PSGSF

SEQ ID NO: 6675 - protein, 5 aa, Artificial Sequence
  Description of Artificial Sequence: Synthetic peptide
ISGSS

SEQ ID NO: 6676 - protein, 5 aa, Artificial Sequence
  Description of Artificial Sequence: Synthetic peptide
ISGSY

SEQ ID NO: 6677 - protein, 5 aa, Artificial Sequence
  Description of Artificial Sequence: Synthetic peptide
ASGSY

SEQ ID NO: 6678 - protein, 5 aa, Artificial Sequence
  Description of Artificial Sequence: Synthetic peptide
RSGSF

SEQ ID NO: 6679 - protein, 5 aa, Artificial Sequence
  Description of Artificial Sequence: Synthetic peptide
DSGSS

SEQ ID NO: 6680 - protein, 5 aa, Artificial Sequence
  Description of Artificial Sequence: Synthetic peptide
DSGSY

SEQ ID NO: 6681 - protein, 5 aa, Artificial Sequence
  Description of Artificial Sequence: Synthetic peptide
LSGSS

SEQ ID NO: 6682 - protein, 5 aa, Artificial Sequence
  Description of Artificial Sequence: Synthetic peptide
SSGSS

SEQ ID NO: 6683 - protein, 5 aa, Artificial Sequence
  Description of Artificial Sequence: Synthetic peptide
HSGSF

SEQ ID NO: 6684 - protein, 5 aa, Artificial Sequence
  Description of Artificial Sequence: Synthetic peptide
HSGSS

SEQ ID NO: 6685 - protein, 5 aa, Artificial Sequence
  Description of Artificial Sequence: Synthetic peptide
LSGSY

SEQ ID NO: 6686 - protein, 5 aa, Artificial Sequence
  Description of Artificial Sequence: Synthetic peptide
ASGSF

SEQ ID NO: 6687 - protein, 5 aa, Artificial Sequence
  Description of Artificial Sequence: Synthetic peptide
VSGSY

SEQ ID NO: 6688 - protein, 5 aa, Artificial Sequence
  Description of Artificial Sequence: Synthetic peptide
ISGSF

SEQ ID NO: 6689 - protein, 5 aa, Artificial Sequence
  Description of Artificial Sequence: Synthetic peptide
VSGSS

SEQ ID NO: 6690 - protein, 5 aa, Artificial Sequence
  Description of Artificial Sequence: Synthetic peptide
DSGSF

SEQ ID NO: 6691 - protein, 5 aa, Artificial Sequence
  Description of Artificial Sequence: Synthetic peptide
IFLES

SEQ ID NO: 6692 - protein, 5 aa, Artificial Sequence
  Description of Artificial Sequence: Synthetic peptide
IFLEL

SEQ ID NO: 6693 - protein, 5 aa, Artificial Sequence
  Description of Artificial Sequence: Synthetic peptide
RFLES

SEQ ID NO: 6694 - protein, 5 aa, Artificial Sequence
  Description of Artificial Sequence: Synthetic peptide
LFLEL

SEQ ID NO: 6695 - protein, 5 aa, Artificial Sequence
  Description of Artificial Sequence: Synthetic peptide
TFLES

SEQ ID NO: 6696 - protein, 5 aa, Artificial Sequence
  Description of Artificial Sequence: Synthetic peptide
GFLEW

SEQ ID NO: 6697 - protein, 5 aa, Artificial Sequence
  Description of Artificial Sequence: Synthetic peptide
GFLES

SEQ ID NO: 6698 - protein, 5 aa, Artificial Sequence
  Description of Artificial Sequence: Synthetic peptide
TFLEW

SEQ ID NO: 6699 - protein, 5 aa, Artificial Sequence
  Description of Artificial Sequence: Synthetic peptide
TFLEL

SEQ ID NO: 6700 - protein, 5 aa, Artificial Sequence
  Description of Artificial Sequence: Synthetic peptide
VFLEW

SEQ ID NO: 6701 - protein, 5 aa, Artificial Sequence
  Description of Artificial Sequence: Synthetic peptide
SFLEL

SEQ ID NO: 6702 - protein, 5 aa, Artificial Sequence
  Description of Artificial Sequence: Synthetic peptide
VFLES

SEQ ID NO: 6703 - protein, 5 aa, Artificial Sequence
  Description of Artificial Sequence: Synthetic peptide
GFLEL

SEQ ID NO: 6704 - protein, 5 aa, Artificial Sequence
  Description of Artificial Sequence: Synthetic peptide
VFLEL

SEQ ID NO: 6705 - protein, 5 aa, Artificial Sequence
  Description of Artificial Sequence: Synthetic peptide
AFLEL

SEQ ID NO: 6706 - protein, 5 aa, Artificial Sequence
  Description of Artificial Sequence: Synthetic peptide
PFLES

SEQ ID NO: 6707 - protein, 5 aa, Artificial Sequence
  Description of Artificial Sequence: Synthetic peptide
SFLEW

SEQ ID NO: 6708 - protein, 5 aa, Artificial Sequence
  Description of Artificial Sequence: Synthetic peptide
AFLES

SEQ ID NO: 6709 - protein, 5 aa, Artificial Sequence
  Description of Artificial Sequence: Synthetic peptide
AFLEW

SEQ ID NO: 6710 - protein, 5 aa, Artificial Sequence
  Description of Artificial Sequence: Synthetic peptide
LFLEW

SEQ ID NO: 6711 - protein, 5 aa, Artificial Sequence
  Description of Artificial Sequence: Synthetic peptide
PFLEL

SEQ ID NO: 6712 - protein, 5 aa, Artificial Sequence
  Description of Artificial Sequence: Synthetic peptide
RFLEL

SEQ ID NO: 6713 - protein, 5 aa, Artificial Sequence
  Description of Artificial Sequence: Synthetic peptide
LFLES

SEQ ID NO: 6714 - protein, 5 aa, Artificial Sequence
  Description of Artificial Sequence: Synthetic peptide
PFLEW

SEQ ID NO: 6715 - protein, 5 aa, Artificial Sequence
  Description of Artificial Sequence: Synthetic peptide
SFLES

SEQ ID NO: 6716 - protein, 5 aa, Artificial Sequence
  Description of Artificial Sequence: Synthetic peptide
IFLEW

SEQ ID NO: 6717 - protein, 5 aa, Artificial Sequence
  Description of Artificial Sequence: Synthetic peptide
PGSYS

SEQ ID NO: 6718 - protein, 5 aa, Artificial Sequence
  Description of Artificial Sequence: Synthetic peptide
AGSYA

SEQ ID NO: 6719 - protein, 5 aa, Artificial Sequence
  Description of Artificial Sequence: Synthetic peptide
HGSYS

SEQ ID NO: 6720 - protein, 5 aa, Artificial Sequence
  Description of Artificial Sequence: Synthetic peptide
HGSYY

SEQ ID NO: 6721 - protein, 5 aa, Artificial Sequence
  Description of Artificial Sequence: Synthetic peptide
PGSYY

SEQ ID NO: 6722 - protein, 5 aa, Artificial Sequence
  Description of Artificial Sequence: Synthetic peptide
SGSYS

SEQ ID NO: 6723 - protein, 5 aa, Artificial Sequence
  Description of Artificial Sequence: Synthetic peptide
SGSYD

SEQ ID NO: 6724 - protein, 5 aa, Artificial Sequence
  Description of Artificial Sequence: Synthetic peptide
SGSYA

SEQ ID NO: 6725 - protein, 5 aa, Artificial Sequence
  Description of Artificial Sequence: Synthetic peptide
LGSYS

SEQ ID NO: 6726 - protein, 5 aa, Artificial Sequence
  Description of Artificial Sequence: Synthetic peptide
VGSYS

SEQ ID NO: 6727 - protein, 5 aa, Artificial Sequence
  Description of Artificial Sequence: Synthetic peptide
DGSYY

SEQ ID NO: 6728 - protein, 5 aa, Artificial Sequence
  Description of Artificial Sequence: Synthetic peptide
FGSYS

SEQ ID NO: 6729 - protein, 5 aa, Artificial Sequence
  Description of Artificial Sequence: Synthetic peptide
FGSYY

SEQ ID NO: 6730 - protein, 5 aa, Artificial Sequence
  Description of Artificial Sequence: Synthetic peptide
HGSYD

SEQ ID NO: 6731 - protein, 5 aa, Artificial Sequence
  Description of Artificial Sequence: Synthetic peptide
LGSYA

SEQ ID NO: 6732 - protein, 5 aa, Artificial Sequence
  Description of Artificial Sequence: Synthetic peptide
HGSYA

SEQ ID NO: 6733 - protein, 5 aa, Artificial Sequence
  Description of Artificial Sequence: Synthetic peptide
LGSYD

SEQ ID NO: 6734 - protein, 5 aa, Artificial Sequence
  Description of Artificial Sequence: Synthetic peptide
DGSYS

SEQ ID NO: 6735 - protein, 5 aa, Artificial Sequence
  Description of Artificial Sequence: Synthetic peptide
VGSYD

SEQ ID NO: 6736 - protein, 5 aa, Artificial Sequence
  Description of Artificial Sequence: Synthetic peptide
VGSYY

SEQ ID NO: 6737 - protein, 5 aa, Artificial Sequence
  Description of Artificial Sequence: Synthetic peptide
AGSYY

SEQ ID NO: 6738 - protein, 5 aa, Artificial Sequence
  Description of Artificial Sequence: Synthetic peptide
YGSYS

SEQ ID NO: 6739 - protein, 5 aa, Artificial Sequence
  Description of Artificial Sequence: Synthetic peptide
AGSYS

SEQ ID NO: 6740 - protein, 5 aa, Artificial Sequence
  Description of Artificial Sequence: Synthetic peptide
AGSYD

SEQ ID NO: 6741 - protein, 5 aa, Artificial Sequence
  Description of Artificial Sequence: Synthetic peptide
VGSYA

SEQ ID NO: 6742 - protein, 5 aa, Artificial Sequence
  Description of Artificial Sequence: Synthetic peptide
DGSYD

SEQ ID NO: 6743 - protein, 5 aa, Artificial Sequence
  Description of Artificial Sequence: Synthetic peptide
FGSYD

SEQ ID NO: 6744 - protein, 5 aa, Artificial Sequence
  Description of Artificial Sequence: Synthetic peptide
DGSYA

SEQ ID NO: 6745 - protein, 5 aa, Artificial Sequence
  Description of Artificial Sequence: Synthetic peptide
YGSYA

SEQ ID NO: 6746 - protein, 5 aa, Artificial Sequence
  Description of Artificial Sequence: Synthetic peptide
FGSYA

SEQ ID NO: 6747 - protein, 5 aa, Artificial Sequence
  Description of Artificial Sequence: Synthetic peptide
YGSYD

SEQ ID NO: 6748 - protein, 5 aa, Artificial Sequence
  Description of Artificial Sequence: Synthetic peptide
LGSYY

SEQ ID NO: 6749 - protein, 5 aa, Artificial Sequence
  Description of Artificial Sequence: Synthetic peptide
PGSYA

SEQ ID NO: 6750 - protein, 5 aa, Artificial Sequence
  Description of Artificial Sequence: Synthetic peptide
PGSYD

SEQ ID NO: 6751 - protein, 5 aa, Artificial Sequence
  Description of Artificial Sequence: Synthetic peptide
YGSYY

SEQ ID NO: 6752 - protein, 5 aa, Artificial Sequence
  Description of Artificial Sequence: Synthetic peptide
FSGSF

SEQ ID NO: 6753 - protein, 5 aa, Artificial Sequence
  Description of Artificial Sequence: Synthetic peptide
FSGSY

SEQ ID NO: 6754 - protein, 5 aa, Artificial Sequence
  Description of Artificial Sequence: Synthetic peptide
YSGSF

SEQ ID NO: 6755 - protein, 5 aa, Artificial Sequence
  Description of Artificial Sequence: Synthetic peptide
YSGSS

SEQ ID NO: 6756 - protein, 5 aa, Artificial Sequence
  Description of Artificial Sequence: Synthetic peptide
FSGSS

SEQ ID NO: 6757 - protein, 5 aa, Artificial Sequence
  Description of Artificial Sequence: Synthetic peptide
ASSSW

SEQ ID NO: 6758 - protein, 5 aa, Artificial Sequence
  Description of Artificial Sequence: Synthetic peptide
VSSSS

SEQ ID NO: 6759 - protein, 5 aa, Artificial Sequence
  Description of Artificial Sequence: Synthetic peptide
YSSSL

SEQ ID NO: 6760 - protein, 5 aa, Artificial Sequence
  Description of Artificial Sequence: Synthetic peptide
VSSSW

SEQ ID NO: 6761 - protein, 5 aa, Artificial Sequence
  Description of Artificial Sequence: Synthetic peptide
ASSSL

SEQ ID NO: 6762 - protein, 5 aa, Artificial Sequence
  Description of Artificial Sequence: Synthetic peptide
HSSSL

SEQ ID NO: 6763 - protein, 5 aa, Artificial Sequence
  Description of Artificial Sequence: Synthetic peptide
PSSSL

SEQ ID NO: 6764 - protein, 5 aa, Artificial Sequence
  Description of Artificial Sequence: Synthetic peptide
ASSSS

SEQ ID NO: 6765 - protein, 5 aa, Artificial Sequence
  Description of Artificial Sequence: Synthetic peptide
HSSSW

SEQ ID NO: 6766 - protein, 5 aa, Artificial Sequence
  Description of Artificial Sequence: Synthetic peptide
VSSSL

SEQ ID NO: 6767 - protein, 5 aa, Artificial Sequence
  Description of Artificial Sequence: Synthetic peptide
FSSSL

SEQ ID NO: 6768 - protein, 5 aa, Artificial Sequence
  Description of Artificial Sequence: Synthetic peptide
HSSSS

SEQ ID NO: 6769 - protein, 5 aa, Artificial Sequence
  Description of Artificial Sequence: Synthetic peptide
FSSSW

SEQ ID NO: 6770 - protein, 5 aa, Artificial Sequence
  Description of Artificial Sequence: Synthetic peptide
SSSSS

SEQ ID NO: 6771 - protein, 5 aa, Artificial Sequence
  Description of Artificial Sequence: Synthetic peptide
DSSSS

SEQ ID NO: 6772 - protein, 5 aa, Artificial Sequence
  Description of Artificial Sequence: Synthetic peptide
SSSSL

SEQ ID NO: 6773 - protein, 5 aa, Artificial Sequence
  Description of Artificial Sequence: Synthetic peptide
FSSSS

SEQ ID NO: 6774 - protein, 5 aa, Artificial Sequence
  Description of Artificial Sequence: Synthetic peptide
LSSSW

SEQ ID NO: 6775 - protein, 5 aa, Artificial Sequence
  Description of Artificial Sequence: Synthetic peptide
DSSSL

SEQ ID NO: 6776 - protein, 5 aa, Artificial Sequence
  Description of Artificial Sequence: Synthetic peptide
LSSSS

SEQ ID NO: 6777 - protein, 5 aa, Artificial Sequence
  Description of Artificial Sequence: Synthetic peptide
LSSSL

SEQ ID NO: 6778 - protein, 5 aa, Artificial Sequence
  Description of Artificial Sequence: Synthetic peptide
SSSSW

SEQ ID NO: 6779 - protein, 5 aa, Artificial Sequence
  Description of Artificial Sequence: Synthetic peptide
DSSSW

SEQ ID NO: 6780 - protein, 5 aa, Artificial Sequence
  Description of Artificial Sequence: Synthetic peptide
PSSSW

SEQ ID NO: 6781 - protein, 5 aa, Artificial Sequence
  Description of Artificial Sequence: Synthetic peptide
PSSSS

SEQ ID NO: 6782 - protein, 5 aa, Artificial Sequence
  Description of Artificial Sequence: Synthetic peptide
HSSGW

SEQ ID NO: 6783 - protein, 5 aa, Artificial Sequence
  Description of Artificial Sequence: Synthetic peptide
FSSGL

SEQ ID NO: 6784 - protein, 5 aa, Artificial Sequence
  Description of Artificial Sequence: Synthetic peptide
SSSGW

SEQ ID NO: 6785 - protein, 5 aa, Artificial Sequence
  Description of Artificial Sequence: Synthetic peptide
SSSGS

SEQ ID NO: 6786 - protein, 5 aa, Artificial Sequence
  Description of Artificial Sequence: Synthetic peptide
DSSGL

SEQ ID NO: 6787 - protein, 5 aa, Artificial Sequence
  Description of Artificial Sequence: Synthetic peptide
HSSGS

SEQ ID NO: 6788 - protein, 5 aa, Artificial Sequence
  Description of Artificial Sequence: Synthetic peptide
FSSGW

SEQ ID NO: 6789 - protein, 5 aa, Artificial Sequence
  Description of Artificial Sequence: Synthetic peptide
ASSGW

SEQ ID NO: 6790 - protein, 5 aa, Artificial Sequence
  Description of Artificial Sequence: Synthetic peptide
DSSGW

SEQ ID NO: 6791 - protein, 5 aa, Artificial Sequence
  Description of Artificial Sequence: Synthetic peptide
DSSGS

SEQ ID NO: 6792 - protein, 5 aa, Artificial Sequence
  Description of Artificial Sequence: Synthetic peptide
ASSGL

SEQ ID NO: 6793 - protein, 5 aa, Artificial Sequence
  Description of Artificial Sequence: Synthetic peptide
LSSGL

SEQ ID NO: 6794 - protein, 5 aa, Artificial Sequence
  Description of Artificial Sequence: Synthetic peptide
FSSGS

SEQ ID NO: 6795 - protein, 5 aa, Artificial Sequence
  Description of Artificial Sequence: Synthetic peptide
ASSGS

SEQ ID NO: 6796 - protein, 5 aa, Artificial Sequence
  Description of Artificial Sequence: Synthetic peptide
PSSGS

SEQ ID NO: 6797 - protein, 5 aa, Artificial Sequence
  Description of Artificial Sequence: Synthetic peptide
LSSGW

SEQ ID NO: 6798 - protein, 5 aa, Artificial Sequence
  Description of Artificial Sequence: Synthetic peptide
LSSGS

SEQ ID NO: 6799 - protein, 5 aa, Artificial Sequence
  Description of Artificial Sequence: Synthetic peptide
YSSGL

SEQ ID NO: 6800 - protein, 5 aa, Artificial Sequence
  Description of Artificial Sequence: Synthetic peptide
VSSGS

SEQ ID NO: 6801 - protein, 5 aa, Artificial Sequence
  Description of Artificial Sequence: Synthetic peptide
PSSGW

SEQ ID NO: 6802 - protein, 5 aa, Artificial Sequence
  Description of Artificial Sequence: Synthetic peptide
PSSGL

SEQ ID NO: 6803 - protein, 5 aa, Artificial Sequence
  Description of Artificial Sequence: Synthetic peptide
VSSGL

SEQ ID NO: 6804 - protein, 5 aa, Artificial Sequence
  Description of Artificial Sequence: Synthetic peptide
VSSGW

SEQ ID NO: 6805 - protein, 5 aa, Artificial Sequence
  Description of Artificial Sequence: Synthetic peptide
SSSGL

SEQ ID NO: 6806 - protein, 5 aa, Artificial Sequence
  Description of Artificial Sequence: Synthetic peptide
HSSGL

SEQ ID NO: 6807 - protein, 5 aa, Artificial Sequence
  Description of Artificial Sequence: Synthetic peptide
YSSGS

SEQ ID NO: 6808 - protein, 5 aa, Artificial Sequence
  Description of Artificial Sequence: Synthetic peptide
VTVTT

SEQ ID NO: 6809 - protein, 5 aa, Artificial Sequence
  Description of Artificial Sequence: Synthetic peptide
RTVTT

SEQ ID NO: 6810 - protein, 5 aa, Artificial Sequence
  Description of Artificial Sequence: Synthetic peptide
LTVTK

SEQ ID NO: 6811 - protein, 5 aa, Artificial Sequence
  Description of Artificial Sequence: Synthetic peptide
ATVTK

SEQ ID NO: 6812 - protein, 5 aa, Artificial Sequence
  Description of Artificial Sequence: Synthetic peptide
GTVTT

SEQ ID NO: 6813 - protein, 5 aa, Artificial Sequence
  Description of Artificial Sequence: Synthetic peptide
VTVTK

SEQ ID NO: 6814 - protein, 5 aa, Artificial Sequence
  Description of Artificial Sequence: Synthetic peptide
LTVTR

SEQ ID NO: 6815 - protein, 5 aa, Artificial Sequence
  Description of Artificial Sequence: Synthetic peptide
ATVTT

SEQ ID NO: 6816 - protein, 5 aa, Artificial Sequence
  Description of Artificial Sequence: Synthetic peptide
RTVTR

SEQ ID NO: 6817 - protein, 5 aa, Artificial Sequence
  Description of Artificial Sequence: Synthetic peptide
VTVTR

SEQ ID NO: 6818 - protein, 5 aa, Artificial Sequence
  Description of Artificial Sequence: Synthetic peptide
TTVTK

SEQ ID NO: 6819 - protein, 5 aa, Artificial Sequence
  Description of Artificial Sequence: Synthetic peptide
GTVTR

SEQ ID NO: 6820 - protein, 5 aa, Artificial Sequence
  Description of Artificial Sequence: Synthetic peptide
TTVTI

SEQ ID NO: 6821 - protein, 5 aa, Artificial Sequence
  Description of Artificial Sequence: Synthetic peptide
RTVTK

SEQ ID NO: 6822 - protein, 5 aa, Artificial Sequence
  Description of Artificial Sequence: Synthetic peptide
LTVTT

SEQ ID NO: 6823 - protein, 5 aa, Artificial Sequence
  Description of Artificial Sequence: Synthetic peptide
VTVTI

SEQ ID NO: 6824 - protein, 5 aa, Artificial Sequence
  Description of Artificial Sequence: Synthetic peptide
GTVTK

SEQ ID NO: 6825 - protein, 5 aa, Artificial Sequence
  Description of Artificial Sequence: Synthetic peptide
TTVTR

SEQ ID NO: 6826 - protein, 5 aa, Artificial Sequence
  Description of Artificial Sequence: Synthetic peptide
GTVTI

SEQ ID NO: 6827 - protein, 5 aa, Artificial Sequence
  Description of Artificial Sequence: Synthetic peptide
PTVTI

SEQ ID NO: 6828 - protein, 5 aa, Artificial Sequence
  Description of Artificial Sequence: Synthetic peptide
STVTT

SEQ ID NO: 6829 - protein, 5 aa, Artificial Sequence
  Description of Artificial Sequence: Synthetic peptide
STVTI

SEQ ID NO: 6830 - protein, 5 aa, Artificial Sequence
  Description of Artificial Sequence: Synthetic peptide
ITVTI

SEQ ID NO: 6831 - protein, 5 aa, Artificial Sequence
  Description of Artificial Sequence: Synthetic peptide
STVTK

SEQ ID NO: 6832 - protein, 5 aa, Artificial Sequence
  Description of Artificial Sequence: Synthetic peptide
STVTR

SEQ ID NO: 6833 - protein, 5 aa, Artificial Sequence
  Description of Artificial Sequence: Synthetic peptide
ATVTI

SEQ ID NO: 6834 - protein, 5 aa, Artificial Sequence
  Description of Artificial Sequence: Synthetic peptide
ITVTT

SEQ ID NO: 6835 - protein, 5 aa, Artificial Sequence
  Description of Artificial Sequence: Synthetic peptide
ITVTR

SEQ ID NO: 6836 - protein, 5 aa, Artificial Sequence
  Description of Artificial Sequence: Synthetic peptide
LTVTI

SEQ ID NO: 6837 - protein, 5 aa, Artificial Sequence
  Description of Artificial Sequence: Synthetic peptide
PTVTR

SEQ ID NO: 6838 - protein, 5 aa, Artificial Sequence
  Description of Artificial Sequence: Synthetic peptide
ATVTR

SEQ ID NO: 6839 - protein, 5 aa, Artificial Sequence
  Description of Artificial Sequence: Synthetic peptide
PTVTK

SEQ ID NO: 6840 - protein, 5 aa, Artificial Sequence
  Description of Artificial Sequence: Synthetic peptide
RTVTI

SEQ ID NO: 6841 - protein, 5 aa, Artificial Sequence
  Description of Artificial Sequence: Synthetic peptide
ITVTK

SEQ ID NO: 6842 - protein, 5 aa, Artificial Sequence
  Description of Artificial Sequence: Synthetic peptide
PTVTT

SEQ ID NO: 6843 - protein, 5 aa, Artificial Sequence
  Description of Artificial Sequence: Synthetic peptide
ASSSF

SEQ ID NO: 6844 - protein, 5 aa, Artificial Sequence
  Description of Artificial Sequence: Synthetic peptide
ASSSY

SEQ ID NO: 6845 - protein, 5 aa, Artificial Sequence
  Description of Artificial Sequence: Synthetic peptide
PSSSF

SEQ ID NO: 6846 - protein, 5 aa, Artificial Sequence
  Description of Artificial Sequence: Synthetic peptide
HSSSF

SEQ ID NO: 6847 - protein, 5 aa, Artificial Sequence
  Description of Artificial Sequence: Synthetic peptide
VSSSY

SEQ ID NO: 6848 - protein, 5 aa, Artificial Sequence
  Description of Artificial Sequence: Synthetic peptide
YSSSF

SEQ ID NO: 6849 - protein, 5 aa, Artificial Sequence
  Description of Artificial Sequence: Synthetic peptide
FSSSF

SEQ ID NO: 6850 - protein, 5 aa, Artificial Sequence
  Description of Artificial Sequence: Synthetic peptide
HSSSY

SEQ ID NO: 6851 - protein, 5 aa, Artificial Sequence
  Description of Artificial Sequence: Synthetic peptide
VSSSF

SEQ ID NO: 6852 - protein, 5 aa, Artificial Sequence
  Description of Artificial Sequence: Synthetic peptide
SSSSY

SEQ ID NO: 6853 - protein, 5 aa, Artificial Sequence
  Description of Artificial Sequence: Synthetic peptide
SSSSF

SEQ ID NO: 6854 - protein, 5 aa, Artificial Sequence
  Description of Artificial Sequence: Synthetic peptide
LSSSY

SEQ ID NO: 6855 - protein, 5 aa, Artificial Sequence
  Description of Artificial Sequence: Synthetic peptide
DSSSY

SEQ ID NO: 6856 - protein, 5 aa, Artificial Sequence
  Description of Artificial Sequence: Synthetic peptide
FSSSY

SEQ ID NO: 6857 - protein, 5 aa, Artificial Sequence
  Description of Artificial Sequence: Synthetic peptide
PSSSY

SEQ ID NO: 6858 - protein, 5 aa, Artificial Sequence
  Description of Artificial Sequence: Synthetic peptide
YSSSY

SEQ ID NO: 6859 - protein, 5 aa, Artificial Sequence
  Description of Artificial Sequence: Synthetic peptide
DSSSF

SEQ ID NO: 6860 - protein, 5 aa, Artificial Sequence
  Description of Artificial Sequence: Synthetic peptide
LSSSF

SEQ ID NO: 6861 - protein, 5 aa, Artificial Sequence
  Description of Artificial Sequence: Synthetic peptide
FSGWF

SEQ ID NO: 6862 - protein, 5 aa, Artificial Sequence
  Description of Artificial Sequence: Synthetic peptide
FSGWS

SEQ ID NO: 6863 - protein, 5 aa, Artificial Sequence
  Description of Artificial Sequence: Synthetic peptide
ISGWY

SEQ ID NO: 6864 - protein, 5 aa, Artificial Sequence
  Description of Artificial Sequence: Synthetic peptide
FSGWY

SEQ ID NO: 6865 - protein, 5 aa, Artificial Sequence
  Description of Artificial Sequence: Synthetic peptide
ISGWS

SEQ ID NO: 6866 - protein, 5 aa, Artificial Sequence
  Description of Artificial Sequence: Synthetic peptide
PSGWS

SEQ ID NO: 6867 - protein, 5 aa, Artificial Sequence
  Description of Artificial Sequence: Synthetic peptide
DSGWF

SEQ ID NO: 6868 - protein, 5 aa, Artificial Sequence
  Description of Artificial Sequence: Synthetic peptide
PSGWY

SEQ ID NO: 6869 - protein, 5 aa, Artificial Sequence
  Description of Artificial Sequence: Synthetic peptide
PSGWF

SEQ ID NO: 6870 - protein, 5 aa, Artificial Sequence
  Description of Artificial Sequence: Synthetic peptide
TSGWY

SEQ ID NO: 6871 - protein, 5 aa, Artificial Sequence
  Description of Artificial Sequence: Synthetic peptide
ASGWF

SEQ ID NO: 6872 - protein, 5 aa, Artificial Sequence
  Description of Artificial Sequence: Synthetic peptide
LSGWF

SEQ ID NO: 6873 - protein, 5 aa, Artificial Sequence
  Description of Artificial Sequence: Synthetic peptide
ISGWF

SEQ ID NO: 6874 - protein, 5 aa, Artificial Sequence
  Description of Artificial Sequence: Synthetic peptide
SSGWS

SEQ ID NO: 6875 - protein, 5 aa, Artificial Sequence
  Description of Artificial Sequence: Synthetic peptide
SSGWF

SEQ ID NO: 6876 - protein, 5 aa, Artificial Sequence
  Description of Artificial Sequence: Synthetic peptide
NSGWS

SEQ ID NO: 6877 - protein, 5 aa, Artificial Sequence
  Description of Artificial Sequence: Synthetic peptide
NSGWY

SEQ ID NO: 6878 - protein, 5 aa, Artificial Sequence
  Description of Artificial Sequence: Synthetic peptide
NSGWF

SEQ ID NO: 6879 - protein, 5 aa, Artificial Sequence
  Description of Artificial Sequence: Synthetic peptide
VSGWS

SEQ ID NO: 6880 - protein, 5 aa, Artificial Sequence
  Description of Artificial Sequence: Synthetic peptide
VSGWY

SEQ ID NO: 6881 - protein, 5 aa, Artificial Sequence
  Description of Artificial Sequence: Synthetic peptide
YSGWF

SEQ ID NO: 6882 - protein, 5 aa, Artificial Sequence
  Description of Artificial Sequence: Synthetic peptide
LSGWS

SEQ ID NO: 6883 - protein, 5 aa, Artificial Sequence
  Description of Artificial Sequence: Synthetic peptide
ASGWY

SEQ ID NO: 6884 - protein, 5 aa, Artificial Sequence
  Description of Artificial Sequence: Synthetic peptide
LSGWY

SEQ ID NO: 6885 - protein, 5 aa, Artificial Sequence
  Description of Artificial Sequence: Synthetic peptide
TSGWF

SEQ ID NO: 6886 - protein, 5 aa, Artificial Sequence
  Description of Artificial Sequence: Synthetic peptide
TSGWS

SEQ ID NO: 6887 - protein, 5 aa, Artificial Sequence
  Description of Artificial Sequence: Synthetic peptide
DSGWY

SEQ ID NO: 6888 - protein, 5 aa, Artificial Sequence
  Description of Artificial Sequence: Synthetic peptide
DSGWS

SEQ ID NO: 6889 - protein, 5 aa, Artificial Sequence
  Description of Artificial Sequence: Synthetic peptide
ASGWS

SEQ ID NO: 6890 - protein, 5 aa, Artificial Sequence
  Description of Artificial Sequence: Synthetic peptide
HSGWF

SEQ ID NO: 6891 - protein, 5 aa, Artificial Sequence
  Description of Artificial Sequence: Synthetic peptide
HSGWS

SEQ ID NO: 6892 - protein, 5 aa, Artificial Sequence
  Description of Artificial Sequence: Synthetic peptide
YSGWS

SEQ ID NO: 6893 - protein, 5 aa, Artificial Sequence
  Description of Artificial Sequence: Synthetic peptide
HSGWY

SEQ ID NO: 6894 - protein, 5 aa, Artificial Sequence
  Description of Artificial Sequence: Synthetic peptide
YSGWY

SEQ ID NO: 6895 - protein, 5 aa, Artificial Sequence
  Description of Artificial Sequence: Synthetic peptide
VSGWF

SEQ ID NO: 6896 - protein, 5 aa, Artificial Sequence
  Description of Artificial Sequence: Synthetic peptide
ISGYD

SEQ ID NO: 6897 - protein, 5 aa, Artificial Sequence
  Description of Artificial Sequence: Synthetic peptide
HSGYA

SEQ ID NO: 6898 - protein, 5 aa, Artificial Sequence
  Description of Artificial Sequence: Synthetic peptide
ISGYA

SEQ ID NO: 6899 - protein, 5 aa, Artificial Sequence
  Description of Artificial Sequence: Synthetic peptide
HSGYG

SEQ ID NO: 6900 - protein, 5 aa, Artificial Sequence
  Description of Artificial Sequence: Synthetic peptide
TSGYD

SEQ ID NO: 6901 - protein, 5 aa, Artificial Sequence
  Description of Artificial Sequence: Synthetic peptide
TSGYA

SEQ ID NO: 6902 - protein, 5 aa, Artificial Sequence
  Description of Artificial Sequence: Synthetic peptide
DSGYA

SEQ ID NO: 6903 - protein, 5 aa, Artificial Sequence
  Description of Artificial Sequence: Synthetic peptide
LSGYA

SEQ ID NO: 6904 - protein, 5 aa, Artificial Sequence
  Description of Artificial Sequence: Synthetic peptide
FSGYA

SEQ ID NO: 6905 - protein, 5 aa, Artificial Sequence
  Description of Artificial Sequence: Synthetic peptide
LSGYD

SEQ ID NO: 6906 - protein, 5 aa, Artificial Sequence
  Description of Artificial Sequence: Synthetic peptide
FSGYG

SEQ ID NO: 6907 - protein, 5 aa, Artificial Sequence
  Description of Artificial Sequence: Synthetic peptide
SSGYD

SEQ ID NO: 6908 - protein, 5 aa, Artificial Sequence
  Description of Artificial Sequence: Synthetic peptide
SSGYA

SEQ ID NO: 6909 - protein, 5 aa, Artificial Sequence
  Description of Artificial Sequence: Synthetic peptide
ISGYG

SEQ ID NO: 6910 - protein, 5 aa, Artificial Sequence
  Description of Artificial Sequence: Synthetic peptide
HSGYD

SEQ ID NO: 6911 - protein, 5 aa, Artificial Sequence
  Description of Artificial Sequence: Synthetic peptide
ASGYD

SEQ ID NO: 6912 - protein, 5 aa, Artificial Sequence
  Description of Artificial Sequence: Synthetic peptide
YSGYA

SEQ ID NO: 6913 - protein, 5 aa, Artificial Sequence
  Description of Artificial Sequence: Synthetic peptide
VSGYA

SEQ ID NO: 6914 - protein, 5 aa, Artificial Sequence
  Description of Artificial Sequence: Synthetic peptide
VSGYG

SEQ ID NO: 6915 - protein, 5 aa, Artificial Sequence
  Description of Artificial Sequence: Synthetic peptide
SSGYG

SEQ ID NO: 6916 - protein, 5 aa, Artificial Sequence
  Description of Artificial Sequence: Synthetic peptide
DSGYD

SEQ ID NO: 6917 - protein, 5 aa, Artificial Sequence
  Description of Artificial Sequence: Synthetic peptide
DSGYG

SEQ ID NO: 6918 - protein, 5 aa, Artificial Sequence
  Description of Artificial Sequence: Synthetic peptide
FSGYD

SEQ ID NO: 6919 - protein, 5 aa, Artificial Sequence
  Description of Artificial Sequence: Synthetic peptide
LSGYG

SEQ ID NO: 6920 - protein, 5 aa, Artificial Sequence
  Description of Artificial Sequence: Synthetic peptide
TSGYG

SEQ ID NO: 6921 - protein, 5 aa, Artificial Sequence
  Description of Artificial Sequence: Synthetic peptide
NSGYA

SEQ ID NO: 6922 - protein, 5 aa, Artificial Sequence
  Description of Artificial Sequence: Synthetic peptide
NSGYG

SEQ ID NO: 6923 - protein, 5 aa, Artificial Sequence
  Description of Artificial Sequence: Synthetic peptide
NSGYD

SEQ ID NO: 6924 - protein, 5 aa, Artificial Sequence
  Description of Artificial Sequence: Synthetic peptide
PSGYA

SEQ ID NO: 6925 - protein, 5 aa, Artificial Sequence
  Description of Artificial Sequence: Synthetic peptide
PSGYG

SEQ ID NO: 6926 - protein, 5 aa, Artificial Sequence
  Description of Artificial Sequence: Synthetic peptide
PSGYD

SEQ ID NO: 6927 - protein, 5 aa, Artificial Sequence
  Description of Artificial Sequence: Synthetic peptide
ASGYG

SEQ ID NO: 6928 - protein, 5 aa, Artificial Sequence
  Description of Artificial Sequence: Synthetic peptide
VSGYD

SEQ ID NO: 6929 - protein, 5 aa, Artificial Sequence
  Description of Artificial Sequence: Synthetic peptide
ASGYA

SEQ ID NO: 6930 - protein, 5 aa, Artificial Sequence
  Description of Artificial Sequence: Synthetic peptide
YSGYG

SEQ ID NO: 6931 - protein, 5 aa, Artificial Sequence
  Description of Artificial Sequence: Synthetic peptide
FYYDS

SEQ ID NO: 6932 - protein, 5 aa, Artificial Sequence
  Description of Artificial Sequence: Synthetic peptide
YYYDT

SEQ ID NO: 6933 - protein, 5 aa, Artificial Sequence
  Description of Artificial Sequence: Synthetic peptide
DYYDS

SEQ ID NO: 6934 - protein, 5 aa, Artificial Sequence
  Description of Artificial Sequence: Synthetic peptide
AYYDS

SEQ ID NO: 6935 - protein, 5 aa, Artificial Sequence
  Description of Artificial Sequence: Synthetic peptide
AYYDT

SEQ ID NO: 6936 - protein, 5 aa, Artificial Sequence
  Description of Artificial Sequence: Synthetic peptide
DYYDI

SEQ ID NO: 6937 - protein, 5 aa, Artificial Sequence
  Description of Artificial Sequence: Synthetic peptide
VYYDI

SEQ ID NO: 6938 - protein, 5 aa, Artificial Sequence
  Description of Artificial Sequence: Synthetic peptide
FYYDT

SEQ ID NO: 6939 - protein, 5 aa, Artificial Sequence
  Description of Artificial Sequence: Synthetic peptide
LYYDI

SEQ ID NO: 6940 - protein, 5 aa, Artificial Sequence
  Description of Artificial Sequence: Synthetic peptide
PYYDI

SEQ ID NO: 6941 - protein, 5 aa, Artificial Sequence
  Description of Artificial Sequence: Synthetic peptide
HYYDI

SEQ ID NO: 6942 - protein, 5 aa, Artificial Sequence
  Description of Artificial Sequence: Synthetic peptide
IYYDI

SEQ ID NO: 6943 - protein, 5 aa, Artificial Sequence
  Description of Artificial Sequence: Synthetic peptide
LYYDS

SEQ ID NO: 6944 - protein, 5 aa, Artificial Sequence
  Description of Artificial Sequence: Synthetic peptide
SYYDI

SEQ ID NO: 6945 - protein, 5 aa, Artificial Sequence
  Description of Artificial Sequence: Synthetic peptide
NYYDT

SEQ ID NO: 6946 - protein, 5 aa, Artificial Sequence
  Description of Artificial Sequence: Synthetic peptide
NYYDS

SEQ ID NO: 6947 - protein, 5 aa, Artificial Sequence
  Description of Artificial Sequence: Synthetic peptide
SYYDT

SEQ ID NO: 6948 - protein, 5 aa, Artificial Sequence
  Description of Artificial Sequence: Synthetic peptide
AYYDI

SEQ ID NO: 6949 - protein, 5 aa, Artificial Sequence
  Description of Artificial Sequence: Synthetic peptide
SYYDS

SEQ ID NO: 6950 - protein, 5 aa, Artificial Sequence
  Description of Artificial Sequence: Synthetic peptide
DYYDT

SEQ ID NO: 6951 - protein, 5 aa, Artificial Sequence
  Description of Artificial Sequence: Synthetic peptide
VYYDT

SEQ ID NO: 6952 - protein, 5 aa, Artificial Sequence
  Description of Artificial Sequence: Synthetic peptide
YYYDI

SEQ ID NO: 6953 - protein, 5 aa, Artificial Sequence
  Description of Artificial Sequence: Synthetic peptide
VYYDS

SEQ ID NO: 6954 - protein, 5 aa, Artificial Sequence
  Description of Artificial Sequence: Synthetic peptide
FYYDI

SEQ ID NO: 6955 - protein, 5 aa, Artificial Sequence
  Description of Artificial Sequence: Synthetic peptide
TYYDT

SEQ ID NO: 6956 - protein, 5 aa, Artificial Sequence
  Description of Artificial Sequence: Synthetic peptide
NYYDI

SEQ ID NO: 6957 - protein, 5 aa, Artificial Sequence
  Description of Artificial Sequence: Synthetic peptide
HYYDS

SEQ ID NO: 6958 - protein, 5 aa, Artificial Sequence
  Description of Artificial Sequence: Synthetic peptide
LYYDT

SEQ ID NO: 6959 - protein, 5 aa, Artificial Sequence
  Description of Artificial Sequence: Synthetic peptide
IYYDT

SEQ ID NO: 6960 - protein, 5 aa, Artificial Sequence
  Description of Artificial Sequence: Synthetic peptide
IYYDS

SEQ ID NO: 6961 - protein, 5 aa, Artificial Sequence
  Description of Artificial Sequence: Synthetic peptide
PYYDT

SEQ ID NO: 6962 - protein, 5 aa, Artificial Sequence
  Description of Artificial Sequence: Synthetic peptide
PYYDS

SEQ ID NO: 6963 - protein, 5 aa, Artificial Sequence
  Description of Artificial Sequence: Synthetic peptide
TYYDI

SEQ ID NO: 6964 - protein, 5 aa, Artificial Sequence
  Description of Artificial Sequence: Synthetic peptide
HYYDT

SEQ ID NO: 6965 - protein, 5 aa, Artificial Sequence
  Description of Artificial Sequence: Synthetic peptide
TYYDS

SEQ ID NO: 6966 - protein, 5 aa, Artificial Sequence
  Description of Artificial Sequence: Synthetic peptide
SSSGY

SEQ ID NO: 6967 - protein, 5 aa, Artificial Sequence
  Description of Artificial Sequence: Synthetic peptide
DSSGF

SEQ ID NO: 6968 - protein, 5 aa, Artificial Sequence
  Description of Artificial Sequence: Synthetic peptide
HSSGY

SEQ ID NO: 6969 - protein, 5 aa, Artificial Sequence
  Description of Artificial Sequence: Synthetic peptide
SSSGF

SEQ ID NO: 6970 - protein, 5 aa, Artificial Sequence
  Description of Artificial Sequence: Synthetic peptide
ASSGF

SEQ ID NO: 6971 - protein, 5 aa, Artificial Sequence
  Description of Artificial Sequence: Synthetic peptide
ASSGY

SEQ ID NO: 6972 - protein, 5 aa, Artificial Sequence
  Description of Artificial Sequence: Synthetic peptide
LSSGF

SEQ ID NO: 6973 - protein, 5 aa, Artificial Sequence
  Description of Artificial Sequence: Synthetic peptide
FSSGY

SEQ ID NO: 6974 - protein, 5 aa, Artificial Sequence
  Description of Artificial Sequence: Synthetic peptide
FSSGF

SEQ ID NO: 6975 - protein, 5 aa, Artificial Sequence
  Description of Artificial Sequence: Synthetic peptide
YSSGF

SEQ ID NO: 6976 - protein, 5 aa, Artificial Sequence
  Description of Artificial Sequence: Synthetic peptide
PSSGY

SEQ ID NO: 6977 - protein, 5 aa, Artificial Sequence
  Description of Artificial Sequence: Synthetic peptide
VSSGY

SEQ ID NO: 6978 - protein, 5 aa, Artificial Sequence
  Description of Artificial Sequence: Synthetic peptide
LSSGY

SEQ ID NO: 6979 - protein, 5 aa, Artificial Sequence
  Description of Artificial Sequence: Synthetic peptide
HSSGF

SEQ ID NO: 6980 - protein, 5 aa, Artificial Sequence
  Description of Artificial Sequence: Synthetic peptide
PSSGF

SEQ ID NO: 6981 - protein, 5 aa, Artificial Sequence
  Description of Artificial Sequence: Synthetic peptide
VSSGF

SEQ ID NO: 6982 - protein, 5 aa, Artificial Sequence
  Description of Artificial Sequence: Synthetic peptide
YSSGY

SEQ ID NO: 6983 - protein, 5 aa, Artificial Sequence
  Description of Artificial Sequence: Synthetic peptide
QAARH

SEQ ID NO: 6984 - protein, 5 aa, Artificial Sequence
  Description of Artificial Sequence: Synthetic peptide
QAARP

SEQ ID NO: 6985 - protein, 5 aa, Artificial Sequence
  Description of Artificial Sequence: Synthetic peptide
TAARR

SEQ ID NO: 6986 - protein, 5 aa, Artificial Sequence
  Description of Artificial Sequence: Synthetic peptide
QAARL

SEQ ID NO: 6987 - protein, 5 aa, Artificial Sequence
  Description of Artificial Sequence: Synthetic peptide
KAARR

SEQ ID NO: 6988 - protein, 5 aa, Artificial Sequence
  Description of Artificial Sequence: Synthetic peptide
KAARP

SEQ ID NO: 6989 - protein, 5 aa, Artificial Sequence
  Description of Artificial Sequence: Synthetic peptide
KAARH

SEQ ID NO: 6990 - protein, 5 aa, Artificial Sequence
  Description of Artificial Sequence: Synthetic peptide
TAARH

SEQ ID NO: 6991 - protein, 5 aa, Artificial Sequence
  Description of Artificial Sequence: Synthetic peptide
TAARP

SEQ ID NO: 6992 - protein, 5 aa, Artificial Sequence
  Description of Artificial Sequence: Synthetic peptide
EAARL

SEQ ID NO: 6993 - protein, 5 aa, Artificial Sequence
  Description of Artificial Sequence: Synthetic peptide
EAARP

SEQ ID NO: 6994 - protein, 5 aa, Artificial Sequence
  Description of Artificial Sequence: Synthetic peptide
AAARL

SEQ ID NO: 6995 - protein, 5 aa, Artificial Sequence
  Description of Artificial Sequence: Synthetic peptide
LAARL

SEQ ID NO: 6996 - protein, 5 aa, Artificial Sequence
  Description of Artificial Sequence: Synthetic peptide
IAARL

SEQ ID NO: 6997 - protein, 5 aa, Artificial Sequence
  Description of Artificial Sequence: Synthetic peptide
IAARH

SEQ ID NO: 6998 - protein, 5 aa, Artificial Sequence
  Description of Artificial Sequence: Synthetic peptide
LAARR

SEQ ID NO: 6999 - protein, 5 aa, Artificial Sequence
  Description of Artificial Sequence: Synthetic peptide
LAARH

SEQ ID NO: 7000 - protein, 5 aa, Artificial Sequence
  Description of Artificial Sequence: Synthetic peptide
EAARH

SEQ ID NO: 7001 - protein, 5 aa, Artificial Sequence
  Description of Artificial Sequence: Synthetic peptide
IAARR

SEQ ID NO: 7002 - protein, 5 aa, Artificial Sequence
  Description of Artificial Sequence: Synthetic peptide
QAARR

SEQ ID NO: 7003 - protein, 5 aa, Artificial Sequence
  Description of Artificial Sequence: Synthetic peptide
EAARR

SEQ ID NO: 7004 - protein, 5 aa, Artificial Sequence
  Description of Artificial Sequence: Synthetic peptide
KAARL

SEQ ID NO: 7005 - protein, 5 aa, Artificial Sequence
  Description of Artificial Sequence: Synthetic peptide
PAARR

SEQ ID NO: 7006 - protein, 5 aa, Artificial Sequence
  Description of Artificial Sequence: Synthetic peptide
PAARP

SEQ ID NO: 7007 - protein, 5 aa, Artificial Sequence
  Description of Artificial Sequence: Synthetic peptide
PAARH

SEQ ID NO: 7008 - protein, 5 aa, Artificial Sequence
  Description of Artificial Sequence: Synthetic peptide
PAARL

SEQ ID NO: 7009 - protein, 5 aa, Artificial Sequence
  Description of Artificial Sequence: Synthetic peptide
VAARR

SEQ ID NO: 7010 - protein, 5 aa, Artificial Sequence
  Description of Artificial Sequence: Synthetic peptide
AAARH

SEQ ID NO: 7011 - protein, 5 aa, Artificial Sequence
  Description of Artificial Sequence: Synthetic peptide
VAARP

SEQ ID NO: 7012 - protein, 5 aa, Artificial Sequence
  Description of Artificial Sequence: Synthetic peptide
VAARH

SEQ ID NO: 7013 - protein, 5 aa, Artificial Sequence
  Description of Artificial Sequence: Synthetic peptide
AAARP

SEQ ID NO: 7014 - protein, 5 aa, Artificial Sequence
  Description of Artificial Sequence: Synthetic peptide
AAARR

SEQ ID NO: 7015 - protein, 5 aa, Artificial Sequence
  Description of Artificial Sequence: Synthetic peptide
TAARL

SEQ ID NO: 7016 - protein, 5 aa, Artificial Sequence
  Description of Artificial Sequence: Synthetic peptide
LAARP

SEQ ID NO: 7017 - protein, 5 aa, Artificial Sequence
  Description of Artificial Sequence: Synthetic peptide
VAARL

SEQ ID NO: 7018 - protein, 5 aa, Artificial Sequence
  Description of Artificial Sequence: Synthetic peptide
EYYYG

SEQ ID NO: 7019 - protein, 5 aa, Artificial Sequence
  Description of Artificial Sequence: Synthetic peptide
VYYYD

SEQ ID NO: 7020 - protein, 5 aa, Artificial Sequence
  Description of Artificial Sequence: Synthetic peptide
EYYYA

SEQ ID NO: 7021 - protein, 5 aa, Artificial Sequence
  Description of Artificial Sequence: Synthetic peptide
VYYYG

SEQ ID NO: 7022 - protein, 5 aa, Artificial Sequence
  Description of Artificial Sequence: Synthetic peptide
EYYYD

SEQ ID NO: 7023 - protein, 5 aa, Artificial Sequence
  Description of Artificial Sequence: Synthetic peptide
PYYYD

SEQ ID NO: 7024 - protein, 5 aa, Artificial Sequence
  Description of Artificial Sequence: Synthetic peptide
PYYYG

SEQ ID NO: 7025 - protein, 5 aa, Artificial Sequence
  Description of Artificial Sequence: Synthetic peptide
AYYYG

SEQ ID NO: 7026 - protein, 5 aa, Artificial Sequence
  Description of Artificial Sequence: Synthetic peptide
TYYYA

SEQ ID NO: 7027 - protein, 5 aa, Artificial Sequence
  Description of Artificial Sequence: Synthetic peptide
TYYYG

SEQ ID NO: 7028 - protein, 5 aa, Artificial Sequence
  Description of Artificial Sequence: Synthetic peptide
TYYYD

SEQ ID NO: 7029 - protein, 5 aa, Artificial Sequence
  Description of Artificial Sequence: Synthetic peptide
QYYYA

SEQ ID NO: 7030 - protein, 5 aa, Artificial Sequence
  Description of Artificial Sequence: Synthetic peptide
QYYYG

SEQ ID NO: 7031 - protein, 5 aa, Artificial Sequence
  Description of Artificial Sequence: Synthetic peptide
QYYYD

SEQ ID NO: 7032 - protein, 5 aa, Artificial Sequence
  Description of Artificial Sequence: Synthetic peptide
VYYYA

SEQ ID NO: 7033 - protein, 5 aa, Artificial Sequence
  Description of Artificial Sequence: Synthetic peptide
LYYYG

SEQ ID NO: 7034 - protein, 5 aa, Artificial Sequence
  Description of Artificial Sequence: Synthetic peptide
LYYYD

SEQ ID NO: 7035 - protein, 5 aa, Artificial Sequence
  Description of Artificial Sequence: Synthetic peptide
LYYYA

SEQ ID NO: 7036 - protein, 5 aa, Artificial Sequence
  Description of Artificial Sequence: Synthetic peptide
AYYYD

SEQ ID NO: 7037 - protein, 5 aa, Artificial Sequence
  Description of Artificial Sequence: Synthetic peptide
AYYYA

SEQ ID NO: 7038 - protein, 5 aa, Artificial Sequence
  Description of Artificial Sequence: Synthetic peptide
PYYYA

SEQ ID NO: 7039 - protein, 5 aa, Artificial Sequence
  Description of Artificial Sequence: Synthetic peptide
MYYYD

SEQ ID NO: 7040 - protein, 5 aa, Artificial Sequence
  Description of Artificial Sequence: Synthetic peptide
KYYYD

SEQ ID NO: 7041 - protein, 5 aa, Artificial Sequence
  Description of Artificial Sequence: Synthetic peptide
KYYYG

SEQ ID NO: 7042 - protein, 5 aa, Artificial Sequence
  Description of Artificial Sequence: Synthetic peptide
MYYYA

SEQ ID NO: 7043 - protein, 5 aa, Artificial Sequence
  Description of Artificial Sequence: Synthetic peptide
KYYYA

SEQ ID NO: 7044 - protein, 5 aa, Artificial Sequence
  Description of Artificial Sequence: Synthetic peptide
MYYYG

SEQ ID NO: 7045 - protein, 5 aa, Artificial Sequence
  Description of Artificial Sequence: Synthetic peptide
LTMVR

SEQ ID NO: 7046 - protein, 5 aa, Artificial Sequence
  Description of Artificial Sequence: Synthetic peptide
RTMVQ

SEQ ID NO: 7047 - protein, 5 aa, Artificial Sequence
  Description of Artificial Sequence: Synthetic peptide
VTMVQ

SEQ ID NO: 7048 - protein, 5 aa, Artificial Sequence
  Description of Artificial Sequence: Synthetic peptide
TTMVR

SEQ ID NO: 7049 - protein, 5 aa, Artificial Sequence
  Description of Artificial Sequence: Synthetic peptide
LTMVQ

SEQ ID NO: 7050 - protein, 5 aa, Artificial Sequence
  Description of Artificial Sequence: Synthetic peptide
STMVQ

SEQ ID NO: 7051 - protein, 5 aa, Artificial Sequence
  Description of Artificial Sequence: Synthetic peptide
ATMVQ

SEQ ID NO: 7052 - protein, 5 aa, Artificial Sequence
  Description of Artificial Sequence: Synthetic peptide
PTMVR

SEQ ID NO: 7053 - protein, 5 aa, Artificial Sequence
  Description of Artificial Sequence: Synthetic peptide
RTMVR

SEQ ID NO: 7054 - protein, 5 aa, Artificial Sequence
  Description of Artificial Sequence: Synthetic peptide
GTMVR

SEQ ID NO: 7055 - protein, 5 aa, Artificial Sequence
  Description of Artificial Sequence: Synthetic peptide
VTMVR

SEQ ID NO: 7056 - protein, 5 aa, Artificial Sequence
  Description of Artificial Sequence: Synthetic peptide
PTMVQ

SEQ ID NO: 7057 - protein, 5 aa, Artificial Sequence
  Description of Artificial Sequence: Synthetic peptide
ATMVR

SEQ ID NO: 7058 - protein, 5 aa, Artificial Sequence
  Description of Artificial Sequence: Synthetic peptide
STMVR

SEQ ID NO: 7059 - protein, 5 aa, Artificial Sequence
  Description of Artificial Sequence: Synthetic peptide
TTMVQ

SEQ ID NO: 7060 - protein, 5 aa, Artificial Sequence
  Description of Artificial Sequence: Synthetic peptide
GTMVQ

SEQ ID NO: 7061 - protein, 5 aa, Artificial Sequence
  Description of Artificial Sequence: Synthetic peptide
HMVQG

SEQ ID NO: 7062 - protein, 5 aa, Artificial Sequence
  Description of Artificial Sequence: Synthetic peptide
DMVQG

SEQ ID NO: 7063 - protein, 5 aa, Artificial Sequence
  Description of Artificial Sequence: Synthetic peptide
LMVQG

SEQ ID NO: 7064 - protein, 5 aa, Artificial Sequence
  Description of Artificial Sequence: Synthetic peptide
SMVQG

SEQ ID NO: 7065 - protein, 5 aa, Artificial Sequence
  Description of Artificial Sequence: Synthetic peptide
FMVQG

SEQ ID NO: 7066 - protein, 5 aa, Artificial Sequence
  Description of Artificial Sequence: Synthetic peptide
NMVQG

SEQ ID NO: 7067 - protein, 5 aa, Artificial Sequence
  Description of Artificial Sequence: Synthetic peptide
VMVQG

SEQ ID NO: 7068 - protein, 5 aa, Artificial Sequence
  Description of Artificial Sequence: Synthetic peptide
PMVQG

SEQ ID NO: 7069 - protein, 5 aa, Artificial Sequence
  Description of Artificial Sequence: Synthetic peptide
YMVQG

SEQ ID NO: 7070 - protein, 5 aa, Artificial Sequence
  Description of Artificial Sequence: Synthetic peptide
AMVQG

SEQ ID NO: 7071 - protein, 5 aa, Artificial Sequence
  Description of Artificial Sequence: Synthetic peptide
IMVQG

SEQ ID NO: 7072 - protein, 5 aa, Artificial Sequence
  Description of Artificial Sequence: Synthetic peptide
PWGSY

SEQ ID NO: 7073 - protein, 5 aa, Artificial Sequence
  Description of Artificial Sequence: Synthetic peptide
TWGSY

SEQ ID NO: 7074 - protein, 5 aa, Artificial Sequence
  Description of Artificial Sequence: Synthetic peptide
SWGSY

SEQ ID NO: 7075 - protein, 5 aa, Artificial Sequence
  Description of Artificial Sequence: Synthetic peptide
HWGSY

SEQ ID NO: 7076 - protein, 5 aa, Artificial Sequence
  Description of Artificial Sequence: Synthetic peptide
LWGSY

SEQ ID NO: 7077 - protein, 5 aa, Artificial Sequence
  Description of Artificial Sequence: Synthetic peptide
DWGSY

SEQ ID NO: 7078 - protein, 5 aa, Artificial Sequence
  Description of Artificial Sequence: Synthetic peptide
FWGSY

SEQ ID NO: 7079 - protein, 5 aa, Artificial Sequence
  Description of Artificial Sequence: Synthetic peptide
AWGSY

SEQ ID NO: 7080 - protein, 5 aa, Artificial Sequence
  Description of Artificial Sequence: Synthetic peptide
YWGSY

SEQ ID NO: 7081 - protein, 5 aa, Artificial Sequence
  Description of Artificial Sequence: Synthetic peptide
IWGSY

SEQ ID NO: 7082 - protein, 5 aa, Artificial Sequence
  Description of Artificial Sequence: Synthetic peptide
NWGSY

SEQ ID NO: 7083 - protein, 6 aa, Artificial Sequence
  Description of Artificial Sequence: Synthetic peptide
FSSSWF

SEQ ID NO: 7084 - protein, 6 aa, Artificial Sequence
  Description of Artificial Sequence: Synthetic peptide
HSSSWS

SEQ ID NO: 7085 - protein, 6 aa, Artificial Sequence
  Description of Artificial Sequence: Synthetic peptide
VSSSWF

SEQ ID NO: 7086 - protein, 6 aa, Artificial Sequence
  Description of Artificial Sequence: Synthetic peptide
HSSSWY

SEQ ID NO: 7087 - protein, 6 aa, Artificial Sequence
  Description of Artificial Sequence: Synthetic peptide
VSSSWS

SEQ ID NO: 7088 - protein, 6 aa, Artificial Sequence
  Description of Artificial Sequence: Synthetic peptide
LSSSWY

SEQ ID NO: 7089 - protein, 6 aa, Artificial Sequence
  Description of Artificial Sequence: Synthetic peptide
VSSSWY

SEQ ID NO: 7090 - protein, 6 aa, Artificial Sequence
  Description of Artificial Sequence: Synthetic peptide
HSSSWF

SEQ ID NO: 7091 - protein, 6 aa, Artificial Sequence
  Description of Artificial Sequence: Synthetic peptide
ASSSWY

SEQ ID NO: 7092 - protein, 6 aa, Artificial Sequence
  Description of Artificial Sequence: Synthetic peptide
DSSSWS

SEQ ID NO: 7093 - protein, 6 aa, Artificial Sequence
  Description of Artificial Sequence: Synthetic peptide
PSSSWY

SEQ ID NO: 7094 - protein, 6 aa, Artificial Sequence
  Description of Artificial Sequence: Synthetic peptide
ASSSWS

SEQ ID NO: 7095 - protein, 6 aa, Artificial Sequence
  Description of Artificial Sequence: Synthetic peptide
DSSSWF

SEQ ID NO: 7096 - protein, 6 aa, Artificial Sequence
  Description of Artificial Sequence: Synthetic peptide
DSSSWY

SEQ ID NO: 7097 - protein, 6 aa, Artificial Sequence
  Description of Artificial Sequence: Synthetic peptide
YSSSWS

SEQ ID NO: 7098 - protein, 6 aa, Artificial Sequence
  Description of Artificial Sequence: Synthetic peptide
YSSSWF

SEQ ID NO: 7099 - protein, 6 aa, Artificial Sequence
  Description of Artificial Sequence: Synthetic peptide
ASSSWF

SEQ ID NO: 7100 - protein, 6 aa, Artificial Sequence
  Description of Artificial Sequence: Synthetic peptide
LSSSWS

SEQ ID NO: 7101 - protein, 6 aa, Artificial Sequence
  Description of Artificial Sequence: Synthetic peptide
SSSSWS

SEQ ID NO: 7102 - protein, 6 aa, Artificial Sequence
  Description of Artificial Sequence: Synthetic peptide
PSSSWS

SEQ ID NO: 7103 - protein, 6 aa, Artificial Sequence
  Description of Artificial Sequence: Synthetic peptide
SSSSWY

SEQ ID NO: 7104 - protein, 6 aa, Artificial Sequence
  Description of Artificial Sequence: Synthetic peptide
LSSSWF

SEQ ID NO: 7105 - protein, 6 aa, Artificial Sequence
  Description of Artificial Sequence: Synthetic peptide
PSSSWF

SEQ ID NO: 7106 - protein, 6 aa, Artificial Sequence
  Description of Artificial Sequence: Synthetic peptide
FSSSWS

SEQ ID NO: 7107 - protein, 6 aa, Artificial Sequence
  Description of Artificial Sequence: Synthetic peptide
SSSSWF

SEQ ID NO: 7108 - protein, 6 aa, Artificial Sequence
  Description of Artificial Sequence: Synthetic peptide
FSSSWY

SEQ ID NO: 7109 - protein, 6 aa, Artificial Sequence
  Description of Artificial Sequence: Synthetic peptide
AYYDST

SEQ ID NO: 7110 - protein, 6 aa, Artificial Sequence
  Description of Artificial Sequence: Synthetic peptide
AYYDSI

SEQ ID NO: 7111 - protein, 6 aa, Artificial Sequence
  Description of Artificial Sequence: Synthetic peptide
YYYDST

SEQ ID NO: 7112 - protein, 6 aa, Artificial Sequence
  Description of Artificial Sequence: Synthetic peptide
PYYDST

SEQ ID NO: 7113 - protein, 6 aa, Artificial Sequence
  Description of Artificial Sequence: Synthetic peptide
VYYDSS

SEQ ID NO: 7114 - protein, 6 aa, Artificial Sequence
  Description of Artificial Sequence: Synthetic peptide
NYYDSI

SEQ ID NO: 7115 - protein, 6 aa, Artificial Sequence
  Description of Artificial Sequence: Synthetic peptide
PYYDSS

SEQ ID NO: 7116 - protein, 6 aa, Artificial Sequence
  Description of Artificial Sequence: Synthetic peptide
YYYDSI

SEQ ID NO: 7117 - protein, 6 aa, Artificial Sequence
  Description of Artificial Sequence: Synthetic peptide
VYYDST

SEQ ID NO: 7118 - protein, 6 aa, Artificial Sequence
  Description of Artificial Sequence: Synthetic peptide
VYYDSI

SEQ ID NO: 7119 - protein, 6 aa, Artificial Sequence
  Description of Artificial Sequence: Synthetic peptide
NYYDST

SEQ ID NO: 7120 - protein, 6 aa, Artificial Sequence
  Description of Artificial Sequence: Synthetic peptide
LYYDST

SEQ ID NO: 7121 - protein, 6 aa, Artificial Sequence
  Description of Artificial Sequence: Synthetic peptide
NYYDSS

SEQ ID NO: 7122 - protein, 6 aa, Artificial Sequence
  Description of Artificial Sequence: Synthetic peptide
SYYDSI

SEQ ID NO: 7123 - protein, 6 aa, Artificial Sequence
  Description of Artificial Sequence: Synthetic peptide
LYYDSS

SEQ ID NO: 7124 - protein, 6 aa, Artificial Sequence
  Description of Artificial Sequence: Synthetic peptide
SYYDST

SEQ ID NO: 7125 - protein, 6 aa, Artificial Sequence
  Description of Artificial Sequence: Synthetic peptide
LYYDSI

SEQ ID NO: 7126 - protein, 6 aa, Artificial Sequence
  Description of Artificial Sequence: Synthetic peptide
SYYDSS

SEQ ID NO: 7127 - protein, 6 aa, Artificial Sequence
  Description of Artificial Sequence: Synthetic peptide
DYYDSI

SEQ ID NO: 7128 - protein, 6 aa, Artificial Sequence
  Description of Artificial Sequence: Synthetic peptide
DYYDST

SEQ ID NO: 7129 - protein, 6 aa, Artificial Sequence
  Description of Artificial Sequence: Synthetic peptide
DYYDSS

SEQ ID NO: 7130 - protein, 6 aa, Artificial Sequence
  Description of Artificial Sequence: Synthetic peptide
FYYDSS

SEQ ID NO: 7131 - protein, 6 aa, Artificial Sequence
  Description of Artificial Sequence: Synthetic peptide
TYYDSI

SEQ ID NO: 7132 - protein, 6 aa, Artificial Sequence
  Description of Artificial Sequence: Synthetic peptide
FYYDST

SEQ ID NO: 7133 - protein, 6 aa, Artificial Sequence
  Description of Artificial Sequence: Synthetic peptide
IYYDST

SEQ ID NO: 7134 - protein, 6 aa, Artificial Sequence
  Description of Artificial Sequence: Synthetic peptide
FYYDSI

SEQ ID NO: 7135 - protein, 6 aa, Artificial Sequence
  Description of Artificial Sequence: Synthetic peptide
IYYDSS

SEQ ID NO: 7136 - protein, 6 aa, Artificial Sequence
  Description of Artificial Sequence: Synthetic peptide
TYYDSS

SEQ ID NO: 7137 - protein, 6 aa, Artificial Sequence
  Description of Artificial Sequence: Synthetic peptide
TYYDST

SEQ ID NO: 7138 - protein, 6 aa, Artificial Sequence
  Description of Artificial Sequence: Synthetic peptide
HYYDSS

SEQ ID NO: 7139 - protein, 6 aa, Artificial Sequence
  Description of Artificial Sequence: Synthetic peptide
HYYDST

SEQ ID NO: 7140 - protein, 6 aa, Artificial Sequence
  Description of Artificial Sequence: Synthetic peptide
IYYDSI

SEQ ID NO: 7141 - protein, 6 aa, Artificial Sequence
  Description of Artificial Sequence: Synthetic peptide
HYYDSI

SEQ ID NO: 7142 - protein, 6 aa, Artificial Sequence
  Description of Artificial Sequence: Synthetic peptide
PYYDSI

SEQ ID NO: 7143 - protein, 6 aa, Artificial Sequence
  Description of Artificial Sequence: Synthetic peptide
AYYDSS

SEQ ID NO: 7144 - protein, 6 aa, Artificial Sequence
  Description of Artificial Sequence: Synthetic peptide
LYSGYA

SEQ ID NO: 7145 - protein, 6 aa, Artificial Sequence
  Description of Artificial Sequence: Synthetic peptide
GYSGYV

SEQ ID NO: 7146 - protein, 6 aa, Artificial Sequence
  Description of Artificial Sequence: Synthetic peptide
SYSGYD

SEQ ID NO: 7147 - protein, 6 aa, Artificial Sequence
  Description of Artificial Sequence: Synthetic peptide
LYSGYD

SEQ ID NO: 7148 - protein, 6 aa, Artificial Sequence
  Description of Artificial Sequence: Synthetic peptide
IYSGYV

SEQ ID NO: 7149 - protein, 6 aa, Artificial Sequence
  Description of Artificial Sequence: Synthetic peptide
SYSGYG

SEQ ID NO: 7150 - protein, 6 aa, Artificial Sequence
  Description of Artificial Sequence: Synthetic peptide
IYSGYG

SEQ ID NO: 7151 - protein, 6 aa, Artificial Sequence
  Description of Artificial Sequence: Synthetic peptide
SYSGYA

SEQ ID NO: 7152 - protein, 6 aa, Artificial Sequence
  Description of Artificial Sequence: Synthetic peptide
PYSGYG

SEQ ID NO: 7153 - protein, 6 aa, Artificial Sequence
  Description of Artificial Sequence: Synthetic peptide
VYSGYD

SEQ ID NO: 7154 - protein, 6 aa, Artificial Sequence
  Description of Artificial Sequence: Synthetic peptide
PYSGYA

SEQ ID NO: 7155 - protein, 6 aa, Artificial Sequence
  Description of Artificial Sequence: Synthetic peptide
VYSGYV

SEQ ID NO: 7156 - protein, 6 aa, Artificial Sequence
  Description of Artificial Sequence: Synthetic peptide
GYSGYG

SEQ ID NO: 7157 - protein, 6 aa, Artificial Sequence
  Description of Artificial Sequence: Synthetic peptide
VYSGYA

SEQ ID NO: 7158 - protein, 6 aa, Artificial Sequence
  Description of Artificial Sequence: Synthetic peptide
PYSGYV

SEQ ID NO: 7159 - protein, 6 aa, Artificial Sequence
  Description of Artificial Sequence: Synthetic peptide
GYSGYA

SEQ ID NO: 7160 - protein, 6 aa, Artificial Sequence
  Description of Artificial Sequence: Synthetic peptide
IYSGYD

SEQ ID NO: 7161 - protein, 6 aa, Artificial Sequence
  Description of Artificial Sequence: Synthetic peptide
PYSGYD

SEQ ID NO: 7162 - protein, 6 aa, Artificial Sequence
  Description of Artificial Sequence: Synthetic peptide
RYSGYV

SEQ ID NO: 7163 - protein, 6 aa, Artificial Sequence
  Description of Artificial Sequence: Synthetic peptide
RYSGYA

SEQ ID NO: 7164 - protein, 6 aa, Artificial Sequence
  Description of Artificial Sequence: Synthetic peptide
RYSGYG

SEQ ID NO: 7165 - protein, 6 aa, Artificial Sequence
  Description of Artificial Sequence: Synthetic peptide
IYSGYA

SEQ ID NO: 7166 - protein, 6 aa, Artificial Sequence
  Description of Artificial Sequence: Synthetic peptide
AYSGYA

SEQ ID NO: 7167 - protein, 6 aa, Artificial Sequence
  Description of Artificial Sequence: Synthetic peptide
RYSGYD

SEQ ID NO: 7168 - protein, 6 aa, Artificial Sequence
  Description of Artificial Sequence: Synthetic peptide
AYSGYG

SEQ ID NO: 7169 - protein, 6 aa, Artificial Sequence
  Description of Artificial Sequence: Synthetic peptide
AYSGYD

SEQ ID NO: 7170 - protein, 6 aa, Artificial Sequence
  Description of Artificial Sequence: Synthetic peptide
AYSGYV

SEQ ID NO: 7171 - protein, 6 aa, Artificial Sequence
  Description of Artificial Sequence: Synthetic peptide
VYSGYG

SEQ ID NO: 7172 - protein, 6 aa, Artificial Sequence
  Description of Artificial Sequence: Synthetic peptide
TYSGYV

SEQ ID NO: 7173 - protein, 6 aa, Artificial Sequence
  Description of Artificial Sequence: Synthetic peptide
TYSGYD

SEQ ID NO: 7174 - protein, 6 aa, Artificial Sequence
  Description of Artificial Sequence: Synthetic peptide
TYSGYA

SEQ ID NO: 7175 - protein, 6 aa, Artificial Sequence
  Description of Artificial Sequence: Synthetic peptide
TYSGYG

SEQ ID NO: 7176 - protein, 6 aa, Artificial Sequence
  Description of Artificial Sequence: Synthetic peptide
SYSGYV

SEQ ID NO: 7177 - protein, 6 aa, Artificial Sequence
  Description of Artificial Sequence: Synthetic peptide
LYSGYV

SEQ ID NO: 7178 - protein, 6 aa, Artificial Sequence
  Description of Artificial Sequence: Synthetic peptide
LYSGYG

SEQ ID NO: 7179 - protein, 6 aa, Artificial Sequence
  Description of Artificial Sequence: Synthetic peptide
SSSGWF

SEQ ID NO: 7180 - protein, 6 aa, Artificial Sequence
  Description of Artificial Sequence: Synthetic peptide
PSSGWY

SEQ ID NO: 7181 - protein, 6 aa, Artificial Sequence
  Description of Artificial Sequence: Synthetic peptide
FSSGWF

SEQ ID NO: 7182 - protein, 6 aa, Artificial Sequence
  Description of Artificial Sequence: Synthetic peptide
PSSGWS

SEQ ID NO: 7183 - protein, 6 aa, Artificial Sequence
  Description of Artificial Sequence: Synthetic peptide
FSSGWS

SEQ ID NO: 7184 - protein, 6 aa, Artificial Sequence
  Description of Artificial Sequence: Synthetic peptide
ASSGWY

SEQ ID NO: 7185 - protein, 6 aa, Artificial Sequence
  Description of Artificial Sequence: Synthetic peptide
FSSGWY

SEQ ID NO: 7186 - protein, 6 aa, Artificial Sequence
  Description of Artificial Sequence: Synthetic peptide
ASSGWS

SEQ ID NO: 7187 - protein, 6 aa, Artificial Sequence
  Description of Artificial Sequence: Synthetic peptide
SSSGWS

SEQ ID NO: 7188 - protein, 6 aa, Artificial Sequence
  Description of Artificial Sequence: Synthetic peptide
SSSGWY

SEQ ID NO: 7189 - protein, 6 aa, Artificial Sequence
  Description of Artificial Sequence: Synthetic peptide
HSSGWS

SEQ ID NO: 7190 - protein, 6 aa, Artificial Sequence
  Description of Artificial Sequence: Synthetic peptide
DSSGWS

SEQ ID NO: 7191 - protein, 6 aa, Artificial Sequence
  Description of Artificial Sequence: Synthetic peptide
YSSGWS

SEQ ID NO: 7192 - protein, 6 aa, Artificial Sequence
  Description of Artificial Sequence: Synthetic peptide
LSSGWF

SEQ ID NO: 7193 - protein, 6 aa, Artificial Sequence
  Description of Artificial Sequence: Synthetic peptide
HSSGWY

SEQ ID NO: 7194 - protein, 6 aa, Artificial Sequence
  Description of Artificial Sequence: Synthetic peptide
DSSGWF

SEQ ID NO: 7195 - protein, 6 aa, Artificial Sequence
  Description of Artificial Sequence: Synthetic peptide
DSSGWY

SEQ ID NO: 7196 - protein, 6 aa, Artificial Sequence
  Description of Artificial Sequence: Synthetic peptide
LSSGWY

SEQ ID NO: 7197 - protein, 6 aa, Artificial Sequence
  Description of Artificial Sequence: Synthetic peptide
HSSGWF

SEQ ID NO: 7198 - protein, 6 aa, Artificial Sequence
  Description of Artificial Sequence: Synthetic peptide
VSSGWS

SEQ ID NO: 7199 - protein, 6 aa, Artificial Sequence
  Description of Artificial Sequence: Synthetic peptide
LSSGWS

SEQ ID NO: 7200 - protein, 6 aa, Artificial Sequence
  Description of Artificial Sequence: Synthetic peptide
VSSGWY

SEQ ID NO: 7201 - protein, 6 aa, Artificial Sequence
  Description of Artificial Sequence: Synthetic peptide
VSSGWF

SEQ ID NO: 7202 - protein, 6 aa, Artificial Sequence
  Description of Artificial Sequence: Synthetic peptide
PSSGWF

SEQ ID NO: 7203 - protein, 6 aa, Artificial Sequence
  Description of Artificial Sequence: Synthetic peptide
ASSGWF

SEQ ID NO: 7204 - protein, 6 aa, Artificial Sequence
  Description of Artificial Sequence: Synthetic peptide
YSSGWF

SEQ ID NO: 7205 - protein, 6 aa, Artificial Sequence
  Description of Artificial Sequence: Synthetic peptide
IYYGSA

SEQ ID NO: 7206 - protein, 6 aa, Artificial Sequence
  Description of Artificial Sequence: Synthetic peptide
PYYGSG

SEQ ID NO: 7207 - protein, 6 aa, Artificial Sequence
  Description of Artificial Sequence: Synthetic peptide
PYYGSA

SEQ ID NO: 7208 - protein, 6 aa, Artificial Sequence
  Description of Artificial Sequence: Synthetic peptide
PYYGSD

SEQ ID NO: 7209 - protein, 6 aa, Artificial Sequence
  Description of Artificial Sequence: Synthetic peptide
VYYGSD

SEQ ID NO: 7210 - protein, 6 aa, Artificial Sequence
  Description of Artificial Sequence: Synthetic peptide
AYYGSA

SEQ ID NO: 7211 - protein, 6 aa, Artificial Sequence
  Description of Artificial Sequence: Synthetic peptide
VYYGSA

SEQ ID NO: 7212 - protein, 6 aa, Artificial Sequence
  Description of Artificial Sequence: Synthetic peptide
NYYGSA

SEQ ID NO: 7213 - protein, 6 aa, Artificial Sequence
  Description of Artificial Sequence: Synthetic peptide
YYYGSA

SEQ ID NO: 7214 - protein, 6 aa, Artificial Sequence
  Description of Artificial Sequence: Synthetic peptide
AYYGSD

SEQ ID NO: 7215 - protein, 6 aa, Artificial Sequence
  Description of Artificial Sequence: Synthetic peptide
NYYGSD

SEQ ID NO: 7216 - protein, 6 aa, Artificial Sequence
  Description of Artificial Sequence: Synthetic peptide
YYYGSD

SEQ ID NO: 7217 - protein, 6 aa, Artificial Sequence
  Description of Artificial Sequence: Synthetic peptide
FYYGSD

SEQ ID NO: 7218 - protein, 6 aa, Artificial Sequence
  Description of Artificial Sequence: Synthetic peptide
NYYGSG

SEQ ID NO: 7219 - protein, 6 aa, Artificial Sequence
  Description of Artificial Sequence: Synthetic peptide
FYYGSA

SEQ ID NO: 7220 - protein, 6 aa, Artificial Sequence
  Description of Artificial Sequence: Synthetic peptide
FYYGSG

SEQ ID NO: 7221 - protein, 6 aa, Artificial Sequence
  Description of Artificial Sequence: Synthetic peptide
AYYGSG

SEQ ID NO: 7222 - protein, 6 aa, Artificial Sequence
  Description of Artificial Sequence: Synthetic peptide
LYYGSG

SEQ ID NO: 7223 - protein, 6 aa, Artificial Sequence
  Description of Artificial Sequence: Synthetic peptide
DYYGSD

SEQ ID NO: 7224 - protein, 6 aa, Artificial Sequence
  Description of Artificial Sequence: Synthetic peptide
LYYGSA

SEQ ID NO: 7225 - protein, 6 aa, Artificial Sequence
  Description of Artificial Sequence: Synthetic peptide
TYYGSD

SEQ ID NO: 7226 - protein, 6 aa, Artificial Sequence
  Description of Artificial Sequence: Synthetic peptide
DYYGSG

SEQ ID NO: 7227 - protein, 6 aa, Artificial Sequence
  Description of Artificial Sequence: Synthetic peptide
DYYGSA

SEQ ID NO: 7228 - protein, 6 aa, Artificial Sequence
  Description of Artificial Sequence: Synthetic peptide
LYYGSD

SEQ ID NO: 7229 - protein, 6 aa, Artificial Sequence
  Description of Artificial Sequence: Synthetic peptide
HYYGSD

SEQ ID NO: 7230 - protein, 6 aa, Artificial Sequence
  Description of Artificial Sequence: Synthetic peptide
TYYGSA

SEQ ID NO: 7231 - protein, 6 aa, Artificial Sequence
  Description of Artificial Sequence: Synthetic peptide
TYYGSG

SEQ ID NO: 7232 - protein, 6 aa, Artificial Sequence
  Description of Artificial Sequence: Synthetic peptide
HYYGSA

SEQ ID NO: 7233 - protein, 6 aa, Artificial Sequence
  Description of Artificial Sequence: Synthetic peptide
SYYGSG

SEQ ID NO: 7234 - protein, 6 aa, Artificial Sequence
  Description of Artificial Sequence: Synthetic peptide
HYYGSG

SEQ ID NO: 7235 - protein, 6 aa, Artificial Sequence
  Description of Artificial Sequence: Synthetic peptide
SYYGSD

SEQ ID NO: 7236 - protein, 6 aa, Artificial Sequence
  Description of Artificial Sequence: Synthetic peptide
VYYGSG

SEQ ID NO: 7237 - protein, 6 aa, Artificial Sequence
  Description of Artificial Sequence: Synthetic peptide
SYYGSA

SEQ ID NO: 7238 - protein, 6 aa, Artificial Sequence
  Description of Artificial Sequence: Synthetic peptide
IYYGSG

SEQ ID NO: 7239 - protein, 6 aa, Artificial Sequence
  Description of Artificial Sequence: Synthetic peptide
IYYGSD

SEQ ID NO: 7240 - protein, 6 aa, Artificial Sequence
  Description of Artificial Sequence: Synthetic peptide
VSSGYS

SEQ ID NO: 7241 - protein, 6 aa, Artificial Sequence
  Description of Artificial Sequence: Synthetic peptide
VSSGYY

SEQ ID NO: 7242 - protein, 6 aa, Artificial Sequence
  Description of Artificial Sequence: Synthetic peptide
FSSGYY

SEQ ID NO: 7243 - protein, 6 aa, Artificial Sequence
  Description of Artificial Sequence: Synthetic peptide
ASSGYF

SEQ ID NO: 7244 - protein, 6 aa, Artificial Sequence
  Description of Artificial Sequence: Synthetic peptide
ASSGYS

SEQ ID NO: 7245 - protein, 6 aa, Artificial Sequence
  Description of Artificial Sequence: Synthetic peptide
FSSGYS

SEQ ID NO: 7246 - protein, 6 aa, Artificial Sequence
  Description of Artificial Sequence: Synthetic peptide
SSSGYY

SEQ ID NO: 7247 - protein, 6 aa, Artificial Sequence
  Description of Artificial Sequence: Synthetic peptide
ASSGYY

SEQ ID NO: 7248 - protein, 6 aa, Artificial Sequence
  Description of Artificial Sequence: Synthetic peptide
FSSGYF

SEQ ID NO: 7249 - protein, 6 aa, Artificial Sequence
  Description of Artificial Sequence: Synthetic peptide
HSSGYY

SEQ ID NO: 7250 - protein, 6 aa, Artificial Sequence
  Description of Artificial Sequence: Synthetic peptide
HSSGYS

SEQ ID NO: 7251 - protein, 6 aa, Artificial Sequence
  Description of Artificial Sequence: Synthetic peptide
SSSGYS

SEQ ID NO: 7252 - protein, 6 aa, Artificial Sequence
  Description of Artificial Sequence: Synthetic peptide
DSSGYS

SEQ ID NO: 7253 - protein, 6 aa, Artificial Sequence
  Description of Artificial Sequence: Synthetic peptide
DSSGYF

SEQ ID NO: 7254 - protein, 6 aa, Artificial Sequence
  Description of Artificial Sequence: Synthetic peptide
HSSGYF

SEQ ID NO: 7255 - protein, 6 aa, Artificial Sequence
  Description of Artificial Sequence: Synthetic peptide
PSSGYF

SEQ ID NO: 7256 - protein, 6 aa, Artificial Sequence
  Description of Artificial Sequence: Synthetic peptide
SSSGYF

SEQ ID NO: 7257 - protein, 6 aa, Artificial Sequence
  Description of Artificial Sequence: Synthetic peptide
YSSGYY

SEQ ID NO: 7258 - protein, 6 aa, Artificial Sequence
  Description of Artificial Sequence: Synthetic peptide
YSSGYF

SEQ ID NO: 7259 - protein, 6 aa, Artificial Sequence
  Description of Artificial Sequence: Synthetic peptide
YSSGYS

SEQ ID NO: 7260 - protein, 6 aa, Artificial Sequence
  Description of Artificial Sequence: Synthetic peptide
PSSGYS

SEQ ID NO: 7261 - protein, 6 aa, Artificial Sequence
  Description of Artificial Sequence: Synthetic peptide
PSSGYY

SEQ ID NO: 7262 - protein, 6 aa, Artificial Sequence
  Description of Artificial Sequence: Synthetic peptide
LSSGYY

SEQ ID NO: 7263 - protein, 6 aa, Artificial Sequence
  Description of Artificial Sequence: Synthetic peptide
LSSGYF

SEQ ID NO: 7264 - protein, 6 aa, Artificial Sequence
  Description of Artificial Sequence: Synthetic peptide
LSSGYS

SEQ ID NO: 7265 - protein, 6 aa, Artificial Sequence
  Description of Artificial Sequence: Synthetic peptide
VSSGYF

SEQ ID NO: 7266 - protein, 6 aa, Artificial Sequence
  Description of Artificial Sequence: Synthetic peptide
TYDSSD

SEQ ID NO: 7267 - protein, 6 aa, Artificial Sequence
  Description of Artificial Sequence: Synthetic peptide
YYDSSA

SEQ ID NO: 7268 - protein, 6 aa, Artificial Sequence
  Description of Artificial Sequence: Synthetic peptide
LYDSSD

SEQ ID NO: 7269 - protein, 6 aa, Artificial Sequence
  Description of Artificial Sequence: Synthetic peptide
LYDSSA

SEQ ID NO: 7270 - protein, 6 aa, Artificial Sequence
  Description of Artificial Sequence: Synthetic peptide
PYDSSA

SEQ ID NO: 7271 - protein, 6 aa, Artificial Sequence
  Description of Artificial Sequence: Synthetic peptide
LYDSSG

SEQ ID NO: 7272 - protein, 6 aa, Artificial Sequence
  Description of Artificial Sequence: Synthetic peptide
PYDSSD

SEQ ID NO: 7273 - protein, 6 aa, Artificial Sequence
  Description of Artificial Sequence: Synthetic peptide
VYDSSD

SEQ ID NO: 7274 - protein, 6 aa, Artificial Sequence
  Description of Artificial Sequence: Synthetic peptide
HYDSSG

SEQ ID NO: 7275 - protein, 6 aa, Artificial Sequence
  Description of Artificial Sequence: Synthetic peptide
VYDSSG

SEQ ID NO: 7276 - protein, 6 aa, Artificial Sequence
  Description of Artificial Sequence: Synthetic peptide
VYDSSA

SEQ ID NO: 7277 - protein, 6 aa, Artificial Sequence
  Description of Artificial Sequence: Synthetic peptide
PYDSSG

SEQ ID NO: 7278 - protein, 6 aa, Artificial Sequence
  Description of Artificial Sequence: Synthetic peptide
SYDSSA

SEQ ID NO: 7279 - protein, 6 aa, Artificial Sequence
  Description of Artificial Sequence: Synthetic peptide
FYDSSG

SEQ ID NO: 7280 - protein, 6 aa, Artificial Sequence
  Description of Artificial Sequence: Synthetic peptide
NYDSSA

SEQ ID NO: 7281 - protein, 6 aa, Artificial Sequence
  Description of Artificial Sequence: Synthetic peptide
SYDSSG

SEQ ID NO: 7282 - protein, 6 aa, Artificial Sequence
  Description of Artificial Sequence: Synthetic peptide
FYDSSA

SEQ ID NO: 7283 - protein, 6 aa, Artificial Sequence
  Description of Artificial Sequence: Synthetic peptide
NYDSSD

SEQ ID NO: 7284 - protein, 6 aa, Artificial Sequence
  Description of Artificial Sequence: Synthetic peptide
SYDSSD

SEQ ID NO: 7285 - protein, 6 aa, Artificial Sequence
  Description of Artificial Sequence: Synthetic peptide
FYDSSD

SEQ ID NO: 7286 - protein, 6 aa, Artificial Sequence
  Description of Artificial Sequence: Synthetic peptide
DYDSSG

SEQ ID NO: 7287 - protein, 6 aa, Artificial Sequence
  Description of Artificial Sequence: Synthetic peptide
AYDSSG

SEQ ID NO: 7288 - protein, 6 aa, Artificial Sequence
  Description of Artificial Sequence: Synthetic peptide
NYDSSG

SEQ ID NO: 7289 - protein, 6 aa, Artificial Sequence
  Description of Artificial Sequence: Synthetic peptide
IYDSSA

SEQ ID NO: 7290 - protein, 6 aa, Artificial Sequence
  Description of Artificial Sequence: Synthetic peptide
DYDSSD

SEQ ID NO: 7291 - protein, 6 aa, Artificial Sequence
  Description of Artificial Sequence: Synthetic peptide
IYDSSG

SEQ ID NO: 7292 - protein, 6 aa, Artificial Sequence
  Description of Artificial Sequence: Synthetic peptide
AYDSSD

SEQ ID NO: 7293 - protein, 6 aa, Artificial Sequence
  Description of Artificial Sequence: Synthetic peptide
DYDSSA

SEQ ID NO: 7294 - protein, 6 aa, Artificial Sequence
  Description of Artificial Sequence: Synthetic peptide
IYDSSD

SEQ ID NO: 7295 - protein, 6 aa, Artificial Sequence
  Description of Artificial Sequence: Synthetic peptide
HYDSSA

SEQ ID NO: 7296 - protein, 6 aa, Artificial Sequence
  Description of Artificial Sequence: Synthetic peptide
AYDSSA

SEQ ID NO: 7297 - protein, 6 aa, Artificial Sequence
  Description of Artificial Sequence: Synthetic peptide
HYDSSD

SEQ ID NO: 7298 - protein, 6 aa, Artificial Sequence
  Description of Artificial Sequence: Synthetic peptide
TYDSSG

SEQ ID NO: 7299 - protein, 6 aa, Artificial Sequence
  Description of Artificial Sequence: Synthetic peptide
TYDSSA

SEQ ID NO: 7300 - protein, 6 aa, Artificial Sequence
  Description of Artificial Sequence: Synthetic peptide
YYDSSD

SEQ ID NO: 7301 - protein, 6 aa, Artificial Sequence
  Description of Artificial Sequence: Synthetic peptide
TDFWSA

SEQ ID NO: 7302 - protein, 6 aa, Artificial Sequence
  Description of Artificial Sequence: Synthetic peptide
ADFWSG

SEQ ID NO: 7303 - protein, 6 aa, Artificial Sequence
  Description of Artificial Sequence: Synthetic peptide
PDFWSG

SEQ ID NO: 7304 - protein, 6 aa, Artificial Sequence
  Description of Artificial Sequence: Synthetic peptide
VDFWSD

SEQ ID NO: 7305 - protein, 6 aa, Artificial Sequence
  Description of Artificial Sequence: Synthetic peptide
TDFWSD

SEQ ID NO: 7306 - protein, 6 aa, Artificial Sequence
  Description of Artificial Sequence: Synthetic peptide
HDFWSA

SEQ ID NO: 7307 - protein, 6 aa, Artificial Sequence
  Description of Artificial Sequence: Synthetic peptide
HDFWSD

SEQ ID NO: 7308 - protein, 6 aa, Artificial Sequence
  Description of Artificial Sequence: Synthetic peptide
TDFWSG

SEQ ID NO: 7309 - protein, 6 aa, Artificial Sequence
  Description of Artificial Sequence: Synthetic peptide
LDFWSA

SEQ ID NO: 7310 - protein, 6 aa, Artificial Sequence
  Description of Artificial Sequence: Synthetic peptide
LDFWSG

SEQ ID NO: 7311 - protein, 6 aa, Artificial Sequence
  Description of Artificial Sequence: Synthetic peptide
HDFWSG

SEQ ID NO: 7312 - protein, 6 aa, Artificial Sequence
  Description of Artificial Sequence: Synthetic peptide
LDFWSD

SEQ ID NO: 7313 - protein, 6 aa, Artificial Sequence
  Description of Artificial Sequence: Synthetic peptide
FDFWSG

SEQ ID NO: 7314 - protein, 6 aa, Artificial Sequence
  Description of Artificial Sequence: Synthetic peptide
DDFWSD

SEQ ID NO: 7315 - protein, 6 aa, Artificial Sequence
  Description of Artificial Sequence: Synthetic peptide
VDFWSA

SEQ ID NO: 7316 - protein, 6 aa, Artificial Sequence
  Description of Artificial Sequence: Synthetic peptide
SDFWSD

SEQ ID NO: 7317 - protein, 6 aa, Artificial Sequence
  Description of Artificial Sequence: Synthetic peptide
SDFWSG

SEQ ID NO: 7318 - protein, 6 aa, Artificial Sequence
  Description of Artificial Sequence: Synthetic peptide
NDFWSD

SEQ ID NO: 7319 - protein, 6 aa, Artificial Sequence
  Description of Artificial Sequence: Synthetic peptide
SDFWSA

SEQ ID NO: 7320 - protein, 6 aa, Artificial Sequence
  Description of Artificial Sequence: Synthetic peptide
NDFWSA

SEQ ID NO: 7321 - protein, 6 aa, Artificial Sequence
  Description of Artificial Sequence: Synthetic peptide
NDFWSG

SEQ ID NO: 7322 - protein, 6 aa, Artificial Sequence
  Description of Artificial Sequence: Synthetic peptide
VDFWSG

SEQ ID NO: 7323 - protein, 6 aa, Artificial Sequence
  Description of Artificial Sequence: Synthetic peptide
IDFWSD

SEQ ID NO: 7324 - protein, 6 aa, Artificial Sequence
  Description of Artificial Sequence: Synthetic peptide
IDFWSG

SEQ ID NO: 7325 - protein, 6 aa, Artificial Sequence
  Description of Artificial Sequence: Synthetic peptide
FDFWSA

SEQ ID NO: 7326 - protein, 6 aa, Artificial Sequence
  Description of Artificial Sequence: Synthetic peptide
ADFWSD

SEQ ID NO: 7327 - protein, 6 aa, Artificial Sequence
  Description of Artificial Sequence: Synthetic peptide
IDFWSA

SEQ ID NO: 7328 - protein, 6 aa, Artificial Sequence
  Description of Artificial Sequence: Synthetic peptide
FDFWSD

SEQ ID NO: 7329 - protein, 6 aa, Artificial Sequence
  Description of Artificial Sequence: Synthetic peptide
DDFWSG

SEQ ID NO: 7330 - protein, 6 aa, Artificial Sequence
  Description of Artificial Sequence: Synthetic peptide
ADFWSA

SEQ ID NO: 7331 - protein, 6 aa, Artificial Sequence
  Description of Artificial Sequence: Synthetic peptide
YDFWSA

SEQ ID NO: 7332 - protein, 6 aa, Artificial Sequence
  Description of Artificial Sequence: Synthetic peptide
PDFWSD

SEQ ID NO: 7333 - protein, 6 aa, Artificial Sequence
  Description of Artificial Sequence: Synthetic peptide
DDFWSA

SEQ ID NO: 7334 - protein, 6 aa, Artificial Sequence
  Description of Artificial Sequence: Synthetic peptide
PDFWSA

SEQ ID NO: 7335 - protein, 6 aa, Artificial Sequence
  Description of Artificial Sequence: Synthetic peptide
YDFWSD

SEQ ID NO: 7336 - protein, 6 aa, Artificial Sequence
  Description of Artificial Sequence: Synthetic peptide
DDSSGY

SEQ ID NO: 7337 - protein, 6 aa, Artificial Sequence
  Description of Artificial Sequence: Synthetic peptide
LDSSGY

SEQ ID NO: 7338 - protein, 6 aa, Artificial Sequence
  Description of Artificial Sequence: Synthetic peptide
HDSSGS

SEQ ID NO: 7339 - protein, 6 aa, Artificial Sequence
  Description of Artificial Sequence: Synthetic peptide
DDSSGF

SEQ ID NO: 7340 - protein, 6 aa, Artificial Sequence
  Description of Artificial Sequence: Synthetic peptide
DDSSGS

SEQ ID NO: 7341 - protein, 6 aa, Artificial Sequence
  Description of Artificial Sequence: Synthetic peptide
LDSSGS

SEQ ID NO: 7342 - protein, 6 aa, Artificial Sequence
  Description of Artificial Sequence: Synthetic peptide
HDSSGY

SEQ ID NO: 7343 - protein, 6 aa, Artificial Sequence
  Description of Artificial Sequence: Synthetic peptide
SDSSGS

SEQ ID NO: 7344 - protein, 6 aa, Artificial Sequence
  Description of Artificial Sequence: Synthetic peptide
SDSSGF

SEQ ID NO: 7345 - protein, 6 aa, Artificial Sequence
  Description of Artificial Sequence: Synthetic peptide
PDSSGS

SEQ ID NO: 7346 - protein, 6 aa, Artificial Sequence
  Description of Artificial Sequence: Synthetic peptide
SDSSGY

SEQ ID NO: 7347 - protein, 6 aa, Artificial Sequence
  Description of Artificial Sequence: Synthetic peptide
PDSSGY

SEQ ID NO: 7348 - protein, 6 aa, Artificial Sequence
  Description of Artificial Sequence: Synthetic peptide
ADSSGY

SEQ ID NO: 7349 - protein, 6 aa, Artificial Sequence
  Description of Artificial Sequence: Synthetic peptide
ADSSGS

SEQ ID NO: 7350 - protein, 6 aa, Artificial Sequence
  Description of Artificial Sequence: Synthetic peptide
ADSSGF

SEQ ID NO: 7351 - protein, 6 aa, Artificial Sequence
  Description of Artificial Sequence: Synthetic peptide
YDSSGF

SEQ ID NO: 7352 - protein, 6 aa, Artificial Sequence
  Description of Artificial Sequence: Synthetic peptide
VDSSGF

SEQ ID NO: 7353 - protein, 6 aa, Artificial Sequence
  Description of Artificial Sequence: Synthetic peptide
FDSSGF

SEQ ID NO: 7354 - protein, 6 aa, Artificial Sequence
  Description of Artificial Sequence: Synthetic peptide
VDSSGY

SEQ ID NO: 7355 - protein, 6 aa, Artificial Sequence
  Description of Artificial Sequence: Synthetic peptide
FDSSGS

SEQ ID NO: 7356 - protein, 6 aa, Artificial Sequence
  Description of Artificial Sequence: Synthetic peptide
VDSSGS

SEQ ID NO: 7357 - protein, 6 aa, Artificial Sequence
  Description of Artificial Sequence: Synthetic peptide
YDSSGS

SEQ ID NO: 7358 - protein, 6 aa, Artificial Sequence
  Description of Artificial Sequence: Synthetic peptide
FDSSGY

SEQ ID NO: 7359 - protein, 6 aa, Artificial Sequence
  Description of Artificial Sequence: Synthetic peptide
LDSSGF

SEQ ID NO: 7360 - protein, 6 aa, Artificial Sequence
  Description of Artificial Sequence: Synthetic peptide
HDSSGF

SEQ ID NO: 7361 - protein, 6 aa, Artificial Sequence
  Description of Artificial Sequence: Synthetic peptide
PDSSGF

SEQ ID NO: 7362 - protein, 6 aa, Artificial Sequence
  Description of Artificial Sequence: Synthetic peptide
EYFDWS

SEQ ID NO: 7363 - protein, 6 aa, Artificial Sequence
  Description of Artificial Sequence: Synthetic peptide
QYFDWL

SEQ ID NO: 7364 - protein, 6 aa, Artificial Sequence
  Description of Artificial Sequence: Synthetic peptide
RYFDWF

SEQ ID NO: 7365 - protein, 6 aa, Artificial Sequence
  Description of Artificial Sequence: Synthetic peptide
AYFDWF

SEQ ID NO: 7366 - protein, 6 aa, Artificial Sequence
  Description of Artificial Sequence: Synthetic peptide
PYFDWF

SEQ ID NO: 7367 - protein, 6 aa, Artificial Sequence
  Description of Artificial Sequence: Synthetic peptide
PYFDWP

SEQ ID NO: 7368 - protein, 6 aa, Artificial Sequence
  Description of Artificial Sequence: Synthetic peptide
LYFDWP

SEQ ID NO: 7369 - protein, 6 aa, Artificial Sequence
  Description of Artificial Sequence: Synthetic peptide
EYFDWP

SEQ ID NO: 7370 - protein, 6 aa, Artificial Sequence
  Description of Artificial Sequence: Synthetic peptide
EYFDWL

SEQ ID NO: 7371 - protein, 6 aa, Artificial Sequence
  Description of Artificial Sequence: Synthetic peptide
LYFDWL

SEQ ID NO: 7372 - protein, 6 aa, Artificial Sequence
  Description of Artificial Sequence: Synthetic peptide
PYFDWL

SEQ ID NO: 7373 - protein, 6 aa, Artificial Sequence
  Description of Artificial Sequence: Synthetic peptide
LYFDWS

SEQ ID NO: 7374 - protein, 6 aa, Artificial Sequence
  Description of Artificial Sequence: Synthetic peptide
QYFDWS

SEQ ID NO: 7375 - protein, 6 aa, Artificial Sequence
  Description of Artificial Sequence: Synthetic peptide
QYFDWF

SEQ ID NO: 7376 - protein, 6 aa, Artificial Sequence
  Description of Artificial Sequence: Synthetic peptide
VYFDWF

SEQ ID NO: 7377 - protein, 6 aa, Artificial Sequence
  Description of Artificial Sequence: Synthetic peptide
RYFDWP

SEQ ID NO: 7378 - protein, 6 aa, Artificial Sequence
  Description of Artificial Sequence: Synthetic peptide
AYFDWP

SEQ ID NO: 7379 - protein, 6 aa, Artificial Sequence
  Description of Artificial Sequence: Synthetic peptide
LYFDWF

SEQ ID NO: 7380 - protein, 6 aa, Artificial Sequence
  Description of Artificial Sequence: Synthetic peptide
AYFDWL

SEQ ID NO: 7381 - protein, 6 aa, Artificial Sequence
  Description of Artificial Sequence: Synthetic peptide
GYFDWF

SEQ ID NO: 7382 - protein, 6 aa, Artificial Sequence
  Description of Artificial Sequence: Synthetic peptide
GYFDWS

SEQ ID NO: 7383 - protein, 6 aa, Artificial Sequence
  Description of Artificial Sequence: Synthetic peptide
VYFDWL

SEQ ID NO: 7384 - protein, 6 aa, Artificial Sequence
  Description of Artificial Sequence: Synthetic peptide
VYFDWS

SEQ ID NO: 7385 - protein, 6 aa, Artificial Sequence
  Description of Artificial Sequence: Synthetic peptide
VYFDWP

SEQ ID NO: 7386 - protein, 6 aa, Artificial Sequence
  Description of Artificial Sequence: Synthetic peptide
RYFDWS

SEQ ID NO: 7387 - protein, 6 aa, Artificial Sequence
  Description of Artificial Sequence: Synthetic peptide
PYFDWS

SEQ ID NO: 7388 - protein, 6 aa, Artificial Sequence
  Description of Artificial Sequence: Synthetic peptide
QYFDWP

SEQ ID NO: 7389 - protein, 6 aa, Artificial Sequence
  Description of Artificial Sequence: Synthetic peptide
EYFDWF

SEQ ID NO: 7390 - protein, 6 aa, Artificial Sequence
  Description of Artificial Sequence: Synthetic peptide
AYFDWS

SEQ ID NO: 7391 - protein, 6 aa, Artificial Sequence
  Description of Artificial Sequence: Synthetic peptide
GYFDWL

SEQ ID NO: 7392 - protein, 6 aa, Artificial Sequence
  Description of Artificial Sequence: Synthetic peptide
GYFDWP

SEQ ID NO: 7393 - protein, 6 aa, Artificial Sequence
  Description of Artificial Sequence: Synthetic peptide
CGSTSC

SEQ ID NO: 7394 - protein, 6 aa, Artificial Sequence
  Description of Artificial Sequence: Synthetic peptide
CSGTSC

SEQ ID NO: 7395 - protein, 6 aa, Artificial Sequence
  Description of Artificial Sequence: Synthetic peptide
CGGTSC

SEQ ID NO: 7396 - protein, 6 aa, Artificial Sequence
  Description of Artificial Sequence: Synthetic peptide
PYYGSE

SEQ ID NO: 7397 - protein, 6 aa, Artificial Sequence
  Description of Artificial Sequence: Synthetic peptide
VYYGSE

SEQ ID NO: 7398 - protein, 6 aa, Artificial Sequence
  Description of Artificial Sequence: Synthetic peptide
AYYGSE

SEQ ID NO: 7399 - protein, 6 aa, Artificial Sequence
  Description of Artificial Sequence: Synthetic peptide
NYYGSE

SEQ ID NO: 7400 - protein, 6 aa, Artificial Sequence
  Description of Artificial Sequence: Synthetic peptide
FYYGSE

SEQ ID NO: 7401 - protein, 6 aa, Artificial Sequence
  Description of Artificial Sequence: Synthetic peptide
YYYGSE

SEQ ID NO: 7402 - protein, 6 aa, Artificial Sequence
  Description of Artificial Sequence: Synthetic peptide
DYYGSE

SEQ ID NO: 7403 - protein, 6 aa, Artificial Sequence
  Description of Artificial Sequence: Synthetic peptide
TYYGSE

SEQ ID NO: 7404 - protein, 6 aa, Artificial Sequence
  Description of Artificial Sequence: Synthetic peptide
HYYGSE

SEQ ID NO: 7405 - protein, 6 aa, Artificial Sequence
  Description of Artificial Sequence: Synthetic peptide
LYYGSE

SEQ ID NO: 7406 - protein, 6 aa, Artificial Sequence
  Description of Artificial Sequence: Synthetic peptide
IYYGSE

SEQ ID NO: 7407 - protein, 6 aa, Artificial Sequence
  Description of Artificial Sequence: Synthetic peptide
SYYGSE

SEQ ID NO: 7408 - protein, 6 aa, Artificial Sequence
  Description of Artificial Sequence: Synthetic peptide
CSSGSC

SEQ ID NO: 7409 - protein, 6 aa, Artificial Sequence
  Description of Artificial Sequence: Synthetic peptide
CGGGSC

SEQ ID NO: 7410 - protein, 6 aa, Artificial Sequence
  Description of Artificial Sequence: Synthetic peptide
CGSGSC

SEQ ID NO: 7411 - protein, 6 aa, Artificial Sequence
  Description of Artificial Sequence: Synthetic peptide
PFWSGS

SEQ ID NO: 7412 - protein, 6 aa, Artificial Sequence
  Description of Artificial Sequence: Synthetic peptide
DFWSGF

SEQ ID NO: 7413 - protein, 6 aa, Artificial Sequence
  Description of Artificial Sequence: Synthetic peptide
PFWSGY

SEQ ID NO: 7414 - protein, 6 aa, Artificial Sequence
  Description of Artificial Sequence: Synthetic peptide
AFWSGY

SEQ ID NO: 7415 - protein, 6 aa, Artificial Sequence
  Description of Artificial Sequence: Synthetic peptide
AFWSGS

SEQ ID NO: 7416 - protein, 6 aa, Artificial Sequence
  Description of Artificial Sequence: Synthetic peptide
AFWSGF

SEQ ID NO: 7417 - protein, 6 aa, Artificial Sequence
  Description of Artificial Sequence: Synthetic peptide
PFWSGF

SEQ ID NO: 7418 - protein, 6 aa, Artificial Sequence
  Description of Artificial Sequence: Synthetic peptide
VFWSGY

SEQ ID NO: 7419 - protein, 6 aa, Artificial Sequence
  Description of Artificial Sequence: Synthetic peptide
YFWSGF

SEQ ID NO: 7420 - protein, 6 aa, Artificial Sequence
  Description of Artificial Sequence: Synthetic peptide
IFWSGS

SEQ ID NO: 7421 - protein, 6 aa, Artificial Sequence
  Description of Artificial Sequence: Synthetic peptide
VFWSGF

SEQ ID NO: 7422 - protein, 6 aa, Artificial Sequence
  Description of Artificial Sequence: Synthetic peptide
VFWSGS

SEQ ID NO: 7423 - protein, 6 aa, Artificial Sequence
  Description of Artificial Sequence: Synthetic peptide
IFWSGF

SEQ ID NO: 7424 - protein, 6 aa, Artificial Sequence
  Description of Artificial Sequence: Synthetic peptide
IFWSGY

SEQ ID NO: 7425 - protein, 6 aa, Artificial Sequence
  Description of Artificial Sequence: Synthetic peptide
SFWSGF

SEQ ID NO: 7426 - protein, 6 aa, Artificial Sequence
  Description of Artificial Sequence: Synthetic peptide
YFWSGY

SEQ ID NO: 7427 - protein, 6 aa, Artificial Sequence
  Description of Artificial Sequence: Synthetic peptide
FFWSGS

SEQ ID NO: 7428 - protein, 6 aa, Artificial Sequence
  Description of Artificial Sequence: Synthetic peptide
YFWSGS

SEQ ID NO: 7429 - protein, 6 aa, Artificial Sequence
  Description of Artificial Sequence: Synthetic peptide
FFWSGY

SEQ ID NO: 7430 - protein, 6 aa, Artificial Sequence
  Description of Artificial Sequence: Synthetic peptide
LFWSGF

SEQ ID NO: 7431 - protein, 6 aa, Artificial Sequence
  Description of Artificial Sequence: Synthetic peptide
TFWSGF

SEQ ID NO: 7432 - protein, 6 aa, Artificial Sequence
  Description of Artificial Sequence: Synthetic peptide
NFWSGF

SEQ ID NO: 7433 - protein, 6 aa, Artificial Sequence
  Description of Artificial Sequence: Synthetic peptide
HFWSGF

SEQ ID NO: 7434 - protein, 6 aa, Artificial Sequence
  Description of Artificial Sequence: Synthetic peptide
NFWSGS

SEQ ID NO: 7435 - protein, 6 aa, Artificial Sequence
  Description of Artificial Sequence: Synthetic peptide
SFWSGS

SEQ ID NO: 7436 - protein, 6 aa, Artificial Sequence
  Description of Artificial Sequence: Synthetic peptide
TFWSGS

SEQ ID NO: 7437 - protein, 6 aa, Artificial Sequence
  Description of Artificial Sequence: Synthetic peptide
NFWSGY

SEQ ID NO: 7438 - protein, 6 aa, Artificial Sequence
  Description of Artificial Sequence: Synthetic peptide
LFWSGY

SEQ ID NO: 7439 - protein, 6 aa, Artificial Sequence
  Description of Artificial Sequence: Synthetic peptide
HFWSGS

SEQ ID NO: 7440 - protein, 6 aa, Artificial Sequence
  Description of Artificial Sequence: Synthetic peptide
SFWSGY

SEQ ID NO: 7441 - protein, 6 aa, Artificial Sequence
  Description of Artificial Sequence: Synthetic peptide
TFWSGY

SEQ ID NO: 7442 - protein, 6 aa, Artificial Sequence
  Description of Artificial Sequence: Synthetic peptide
DFWSGS

SEQ ID NO: 7443 - protein, 6 aa, Artificial Sequence
  Description of Artificial Sequence: Synthetic peptide
LFWSGS

SEQ ID NO: 7444 - protein, 6 aa, Artificial Sequence
  Description of Artificial Sequence: Synthetic peptide
HFWSGY

SEQ ID NO: 7445 - protein, 6 aa, Artificial Sequence
  Description of Artificial Sequence: Synthetic peptide
FFWSGF

SEQ ID NO: 7446 - protein, 7 aa, Artificial Sequence
  Description of Artificial Sequence: Synthetic peptide
DYYDSSG

SEQ ID NO: 7447 - protein, 7 aa, Artificial Sequence
  Description of Artificial Sequence: Synthetic peptide
SYYDSSG

SEQ ID NO: 7448 - protein, 7 aa, Artificial Sequence
  Description of Artificial Sequence: Synthetic peptide
IYYDSSG

SEQ ID NO: 7449 - protein, 7 aa, Artificial Sequence
  Description of Artificial Sequence: Synthetic peptide
HYYDSSG

SEQ ID NO: 7450 - protein, 7 aa, Artificial Sequence
  Description of Artificial Sequence: Synthetic peptide
SYYDSSA

SEQ ID NO: 7451 - protein, 7 aa, Artificial Sequence
  Description of Artificial Sequence: Synthetic peptide
SYYDSSD

SEQ ID NO: 7452 - protein, 7 aa, Artificial Sequence
  Description of Artificial Sequence: Synthetic peptide
IYYDSSA

SEQ ID NO: 7453 - protein, 7 aa, Artificial Sequence
  Description of Artificial Sequence: Synthetic peptide
AYYDSSA

SEQ ID NO: 7454 - protein, 7 aa, Artificial Sequence
  Description of Artificial Sequence: Synthetic peptide
IYYDSSD

SEQ ID NO: 7455 - protein, 7 aa, Artificial Sequence
  Description of Artificial Sequence: Synthetic peptide
AYYDSSD

SEQ ID NO: 7456 - protein, 7 aa, Artificial Sequence
  Description of Artificial Sequence: Synthetic peptide
HYYDSSD

SEQ ID NO: 7457 - protein, 7 aa, Artificial Sequence
  Description of Artificial Sequence: Synthetic peptide
VYYDSSD

SEQ ID NO: 7458 - protein, 7 aa, Artificial Sequence
  Description of Artificial Sequence: Synthetic peptide
HYYDSSA

SEQ ID NO: 7459 - protein, 7 aa, Artificial Sequence
  Description of Artificial Sequence: Synthetic peptide
AYYDSSG

SEQ ID NO: 7460 - protein, 7 aa, Artificial Sequence
  Description of Artificial Sequence: Synthetic peptide
VYYDSSA

SEQ ID NO: 7461 - protein, 7 aa, Artificial Sequence
  Description of Artificial Sequence: Synthetic peptide
LYYDSSG

SEQ ID NO: 7462 - protein, 7 aa, Artificial Sequence
  Description of Artificial Sequence: Synthetic peptide
VYYDSSG

SEQ ID NO: 7463 - protein, 7 aa, Artificial Sequence
  Description of Artificial Sequence: Synthetic peptide
LYYDSSD

SEQ ID NO: 7464 - protein, 7 aa, Artificial Sequence
  Description of Artificial Sequence: Synthetic peptide
FYYDSSG

SEQ ID NO: 7465 - protein, 7 aa, Artificial Sequence
  Description of Artificial Sequence: Synthetic peptide
LYYDSSA

SEQ ID NO: 7466 - protein, 7 aa, Artificial Sequence
  Description of Artificial Sequence: Synthetic peptide
FYYDSSD

SEQ ID NO: 7467 - protein, 7 aa, Artificial Sequence
  Description of Artificial Sequence: Synthetic peptide
TYYDSSG

SEQ ID NO: 7468 - protein, 7 aa, Artificial Sequence
  Description of Artificial Sequence: Synthetic peptide
PYYDSSG

SEQ ID NO: 7469 - protein, 7 aa, Artificial Sequence
  Description of Artificial Sequence: Synthetic peptide
FYYDSSA

SEQ ID NO: 7470 - protein, 7 aa, Artificial Sequence
  Description of Artificial Sequence: Synthetic peptide
TYYDSSD

SEQ ID NO: 7471 - protein, 7 aa, Artificial Sequence
  Description of Artificial Sequence: Synthetic peptide
NYYDSSG

SEQ ID NO: 7472 - protein, 7 aa, Artificial Sequence
  Description of Artificial Sequence: Synthetic peptide
TYYDSSA

SEQ ID NO: 7473 - protein, 7 aa, Artificial Sequence
  Description of Artificial Sequence: Synthetic peptide
PYYDSSA

SEQ ID NO: 7474 - protein, 7 aa, Artificial Sequence
  Description of Artificial Sequence: Synthetic peptide
PYYDSSD

SEQ ID NO: 7475 - protein, 7 aa, Artificial Sequence
  Description of Artificial Sequence: Synthetic peptide
NYYDSSA

SEQ ID NO: 7476 - protein, 7 aa, Artificial Sequence
  Description of Artificial Sequence: Synthetic peptide
YYYDSSD

SEQ ID NO: 7477 - protein, 7 aa, Artificial Sequence
  Description of Artificial Sequence: Synthetic peptide
NYYDSSD

SEQ ID NO: 7478 - protein, 7 aa, Artificial Sequence
  Description of Artificial Sequence: Synthetic peptide
YYYDSSA

SEQ ID NO: 7479 - protein, 7 aa, Artificial Sequence
  Description of Artificial Sequence: Synthetic peptide
DYYDSSD

SEQ ID NO: 7480 - protein, 7 aa, Artificial Sequence
  Description of Artificial Sequence: Synthetic peptide
DYYDSSA

SEQ ID NO: 7481 - protein, 7 aa, Artificial Sequence
  Description of Artificial Sequence: Synthetic peptide
FDILTGF

SEQ ID NO: 7482 - protein, 7 aa, Artificial Sequence
  Description of Artificial Sequence: Synthetic peptide
FDILTGS

SEQ ID NO: 7483 - protein, 7 aa, Artificial Sequence
  Description of Artificial Sequence: Synthetic peptide
LDILTGY

SEQ ID NO: 7484 - protein, 7 aa, Artificial Sequence
  Description of Artificial Sequence: Synthetic peptide
YDILTGF

SEQ ID NO: 7485 - protein, 7 aa, Artificial Sequence
  Description of Artificial Sequence: Synthetic peptide
LDILTGS

SEQ ID NO: 7486 - protein, 7 aa, Artificial Sequence
  Description of Artificial Sequence: Synthetic peptide
SDILTGF

SEQ ID NO: 7487 - protein, 7 aa, Artificial Sequence
  Description of Artificial Sequence: Synthetic peptide
IDILTGS

SEQ ID NO: 7488 - protein, 7 aa, Artificial Sequence
  Description of Artificial Sequence: Synthetic peptide
PDILTGS

SEQ ID NO: 7489 - protein, 7 aa, Artificial Sequence
  Description of Artificial Sequence: Synthetic peptide
PDILTGF

SEQ ID NO: 7490 - protein, 7 aa, Artificial Sequence
  Description of Artificial Sequence: Synthetic peptide
IDILTGF

SEQ ID NO: 7491 - protein, 7 aa, Artificial Sequence
  Description of Artificial Sequence: Synthetic peptide
IDILTGY

SEQ ID NO: 7492 - protein, 7 aa, Artificial Sequence
  Description of Artificial Sequence: Synthetic peptide
PDILTGY

SEQ ID NO: 7493 - protein, 7 aa, Artificial Sequence
  Description of Artificial Sequence: Synthetic peptide
DDILTGF

SEQ ID NO: 7494 - protein, 7 aa, Artificial Sequence
  Description of Artificial Sequence: Synthetic peptide
YDILTGS

SEQ ID NO: 7495 - protein, 7 aa, Artificial Sequence
  Description of Artificial Sequence: Synthetic peptide
HDILTGY

SEQ ID NO: 7496 - protein, 7 aa, Artificial Sequence
  Description of Artificial Sequence: Synthetic peptide
TDILTGF

SEQ ID NO: 7497 - protein, 7 aa, Artificial Sequence
  Description of Artificial Sequence: Synthetic peptide
VDILTGY

SEQ ID NO: 7498 - protein, 7 aa, Artificial Sequence
  Description of Artificial Sequence: Synthetic peptide
LDILTGF

SEQ ID NO: 7499 - protein, 7 aa, Artificial Sequence
  Description of Artificial Sequence: Synthetic peptide
VDILTGS

SEQ ID NO: 7500 - protein, 7 aa, Artificial Sequence
  Description of Artificial Sequence: Synthetic peptide
HDILTGS

SEQ ID NO: 7501 - protein, 7 aa, Artificial Sequence
  Description of Artificial Sequence: Synthetic peptide
ADILTGS

SEQ ID NO: 7502 - protein, 7 aa, Artificial Sequence
  Description of Artificial Sequence: Synthetic peptide
HDILTGF

SEQ ID NO: 7503 - protein, 7 aa, Artificial Sequence
  Description of Artificial Sequence: Synthetic peptide
NDILTGS

SEQ ID NO: 7504 - protein, 7 aa, Artificial Sequence
  Description of Artificial Sequence: Synthetic peptide
NDILTGF

SEQ ID NO: 7505 - protein, 7 aa, Artificial Sequence
  Description of Artificial Sequence: Synthetic peptide
ADILTGY

SEQ ID NO: 7506 - protein, 7 aa, Artificial Sequence
  Description of Artificial Sequence: Synthetic peptide
VDILTGF

SEQ ID NO: 7507 - protein, 7 aa, Artificial Sequence
  Description of Artificial Sequence: Synthetic peptide
TDILTGY

SEQ ID NO: 7508 - protein, 7 aa, Artificial Sequence
  Description of Artificial Sequence: Synthetic peptide
ADILTGF

SEQ ID NO: 7509 - protein, 7 aa, Artificial Sequence
  Description of Artificial Sequence: Synthetic peptide
NDILTGY

SEQ ID NO: 7510 - protein, 7 aa, Artificial Sequence
  Description of Artificial Sequence: Synthetic peptide
TDILTGS

SEQ ID NO: 7511 - protein, 7 aa, Artificial Sequence
  Description of Artificial Sequence: Synthetic peptide
SDILTGS

SEQ ID NO: 7512 - protein, 7 aa, Artificial Sequence
  Description of Artificial Sequence: Synthetic peptide
DDILTGY

SEQ ID NO: 7513 - protein, 7 aa, Artificial Sequence
  Description of Artificial Sequence: Synthetic peptide
SDILTGY

SEQ ID NO: 7514 - protein, 7 aa, Artificial Sequence
  Description of Artificial Sequence: Synthetic peptide
DDILTGS

SEQ ID NO: 7515 - protein, 7 aa, Artificial Sequence
  Description of Artificial Sequence: Synthetic peptide
FDILTGY

SEQ ID NO: 7516 - protein, 7 aa, Artificial Sequence
  Description of Artificial Sequence: Synthetic peptide
SYDFWSA

SEQ ID NO: 7517 - protein, 7 aa, Artificial Sequence
  Description of Artificial Sequence: Synthetic peptide
FYDFWSG

SEQ ID NO: 7518 - protein, 7 aa, Artificial Sequence
  Description of Artificial Sequence: Synthetic peptide
IYDFWSD

SEQ ID NO: 7519 - protein, 7 aa, Artificial Sequence
  Description of Artificial Sequence: Synthetic peptide
LYDFWSD

SEQ ID NO: 7520 - protein, 7 aa, Artificial Sequence
  Description of Artificial Sequence: Synthetic peptide
AYDFWSD

SEQ ID NO: 7521 - protein, 7 aa, Artificial Sequence
  Description of Artificial Sequence: Synthetic peptide
IYDFWSA

SEQ ID NO: 7522 - protein, 7 aa, Artificial Sequence
  Description of Artificial Sequence: Synthetic peptide
PYDFWSD

SEQ ID NO: 7523 - protein, 7 aa, Artificial Sequence
  Description of Artificial Sequence: Synthetic peptide
AYDFWSA

SEQ ID NO: 7524 - protein, 7 aa, Artificial Sequence
  Description of Artificial Sequence: Synthetic peptide
SYDFWSG

SEQ ID NO: 7525 - protein, 7 aa, Artificial Sequence
  Description of Artificial Sequence: Synthetic peptide
FYDFWSA

SEQ ID NO: 7526 - protein, 7 aa, Artificial Sequence
  Description of Artificial Sequence: Synthetic peptide
PYDFWSA

SEQ ID NO: 7527 - protein, 7 aa, Artificial Sequence
  Description of Artificial Sequence: Synthetic peptide
FYDFWSD

SEQ ID NO: 7528 - protein, 7 aa, Artificial Sequence
  Description of Artificial Sequence: Synthetic peptide
IYDFWSG

SEQ ID NO: 7529 - protein, 7 aa, Artificial Sequence
  Description of Artificial Sequence: Synthetic peptide
PYDFWSG

SEQ ID NO: 7530 - protein, 7 aa, Artificial Sequence
  Description of Artificial Sequence: Synthetic peptide
YYDFWSA

SEQ ID NO: 7531 - protein, 7 aa, Artificial Sequence
  Description of Artificial Sequence: Synthetic peptide
YYDFWSD

SEQ ID NO: 7532 - protein, 7 aa, Artificial Sequence
  Description of Artificial Sequence: Synthetic peptide
NYDFWSD

SEQ ID NO: 7533 - protein, 7 aa, Artificial Sequence
  Description of Artificial Sequence: Synthetic peptide
VYDFWSA

SEQ ID NO: 7534 - protein, 7 aa, Artificial Sequence
  Description of Artificial Sequence: Synthetic peptide
NYDFWSA

SEQ ID NO: 7535 - protein, 7 aa, Artificial Sequence
  Description of Artificial Sequence: Synthetic peptide
VYDFWSD

SEQ ID NO: 7536 - protein, 7 aa, Artificial Sequence
  Description of Artificial Sequence: Synthetic peptide
VYDFWSG

SEQ ID NO: 7537 - protein, 7 aa, Artificial Sequence
  Description of Artificial Sequence: Synthetic peptide
NYDFWSG

SEQ ID NO: 7538 - protein, 7 aa, Artificial Sequence
  Description of Artificial Sequence: Synthetic peptide
DYDFWSA

SEQ ID NO: 7539 - protein, 7 aa, Artificial Sequence
  Description of Artificial Sequence: Synthetic peptide
DYDFWSD

SEQ ID NO: 7540 - protein, 7 aa, Artificial Sequence
  Description of Artificial Sequence: Synthetic peptide
DYDFWSG

SEQ ID NO: 7541 - protein, 7 aa, Artificial Sequence
  Description of Artificial Sequence: Synthetic peptide
HYDFWSG

SEQ ID NO: 7542 - protein, 7 aa, Artificial Sequence
  Description of Artificial Sequence: Synthetic peptide
TYDFWSG

SEQ ID NO: 7543 - protein, 7 aa, Artificial Sequence
  Description of Artificial Sequence: Synthetic peptide
HYDFWSA

SEQ ID NO: 7544 - protein, 7 aa, Artificial Sequence
  Description of Artificial Sequence: Synthetic peptide
LYDFWSG

SEQ ID NO: 7545 - protein, 7 aa, Artificial Sequence
  Description of Artificial Sequence: Synthetic peptide
HYDFWSD

SEQ ID NO: 7546 - protein, 7 aa, Artificial Sequence
  Description of Artificial Sequence: Synthetic peptide
TYDFWSA

SEQ ID NO: 7547 - protein, 7 aa, Artificial Sequence
  Description of Artificial Sequence: Synthetic peptide
SYDFWSD

SEQ ID NO: 7548 - protein, 7 aa, Artificial Sequence
  Description of Artificial Sequence: Synthetic peptide
TYDFWSD

SEQ ID NO: 7549 - protein, 7 aa, Artificial Sequence
  Description of Artificial Sequence: Synthetic peptide
LYDFWSA

SEQ ID NO: 7550 - protein, 7 aa, Artificial Sequence
  Description of Artificial Sequence: Synthetic peptide
AYDFWSG

SEQ ID NO: 7551 - protein, 7 aa, Artificial Sequence
  Description of Artificial Sequence: Synthetic peptide
SCSSTSC

SEQ ID NO: 7552 - protein, 7 aa, Artificial Sequence
  Description of Artificial Sequence: Synthetic peptide
HCSSTSC

SEQ ID NO: 7553 - protein, 7 aa, Artificial Sequence
  Description of Artificial Sequence: Synthetic peptide
PCSSTSC

SEQ ID NO: 7554 - protein, 7 aa, Artificial Sequence
  Description of Artificial Sequence: Synthetic peptide
ACSSTSC

SEQ ID NO: 7555 - protein, 7 aa, Artificial Sequence
  Description of Artificial Sequence: Synthetic peptide
VCSSTSC

SEQ ID NO: 7556 - protein, 7 aa, Artificial Sequence
  Description of Artificial Sequence: Synthetic peptide
LCSSTSC

SEQ ID NO: 7557 - protein, 7 aa, Artificial Sequence
  Description of Artificial Sequence: Synthetic peptide
FCSSTSC

SEQ ID NO: 7558 - protein, 7 aa, Artificial Sequence
  Description of Artificial Sequence: Synthetic peptide
DCSSTSC

SEQ ID NO: 7559 - protein, 7 aa, Artificial Sequence
  Description of Artificial Sequence: Synthetic peptide
RYSSSWS

SEQ ID NO: 7560 - protein, 7 aa, Artificial Sequence
  Description of Artificial Sequence: Synthetic peptide
VYSSSWY

SEQ ID NO: 7561 - protein, 7 aa, Artificial Sequence
  Description of Artificial Sequence: Synthetic peptide
VYSSSWS

SEQ ID NO: 7562 - protein, 7 aa, Artificial Sequence
  Description of Artificial Sequence: Synthetic peptide
TYSSSWY

SEQ ID NO: 7563 - protein, 7 aa, Artificial Sequence
  Description of Artificial Sequence: Synthetic peptide
TYSSSWF

SEQ ID NO: 7564 - protein, 7 aa, Artificial Sequence
  Description of Artificial Sequence: Synthetic peptide
TYSSSWS

SEQ ID NO: 7565 - protein, 7 aa, Artificial Sequence
  Description of Artificial Sequence: Synthetic peptide
GYSSSWF

SEQ ID NO: 7566 - protein, 7 aa, Artificial Sequence
  Description of Artificial Sequence: Synthetic peptide
LYSSSWF

SEQ ID NO: 7567 - protein, 7 aa, Artificial Sequence
  Description of Artificial Sequence: Synthetic peptide
AYSSSWS

SEQ ID NO: 7568 - protein, 7 aa, Artificial Sequence
  Description of Artificial Sequence: Synthetic peptide
SYSSSWF

SEQ ID NO: 7569 - protein, 7 aa, Artificial Sequence
  Description of Artificial Sequence: Synthetic peptide
WYSSSWS

SEQ ID NO: 7570 - protein, 7 aa, Artificial Sequence
  Description of Artificial Sequence: Synthetic peptide
WYSSSWF

SEQ ID NO: 7571 - protein, 7 aa, Artificial Sequence
  Description of Artificial Sequence: Synthetic peptide
MYSSSWS

SEQ ID NO: 7572 - protein, 7 aa, Artificial Sequence
  Description of Artificial Sequence: Synthetic peptide
SYSSSWS

SEQ ID NO: 7573 - protein, 7 aa, Artificial Sequence
  Description of Artificial Sequence: Synthetic peptide
LYSSSWY

SEQ ID NO: 7574 - protein, 7 aa, Artificial Sequence
  Description of Artificial Sequence: Synthetic peptide
AYSSSWY

SEQ ID NO: 7575 - protein, 7 aa, Artificial Sequence
  Description of Artificial Sequence: Synthetic peptide
AYSSSWF

SEQ ID NO: 7576 - protein, 7 aa, Artificial Sequence
  Description of Artificial Sequence: Synthetic peptide
LYSSSWS

SEQ ID NO: 7577 - protein, 7 aa, Artificial Sequence
  Description of Artificial Sequence: Synthetic peptide
WYSSSWY

SEQ ID NO: 7578 - protein, 7 aa, Artificial Sequence
  Description of Artificial Sequence: Synthetic peptide
VYSSSWF

SEQ ID NO: 7579 - protein, 7 aa, Artificial Sequence
  Description of Artificial Sequence: Synthetic peptide
SYSSSWY

SEQ ID NO: 7580 - protein, 7 aa, Artificial Sequence
  Description of Artificial Sequence: Synthetic peptide
RYSSSWF

SEQ ID NO: 7581 - protein, 7 aa, Artificial Sequence
  Description of Artificial Sequence: Synthetic peptide
MYSSSWF

SEQ ID NO: 7582 - protein, 7 aa, Artificial Sequence
  Description of Artificial Sequence: Synthetic peptide
RYSSSWY

SEQ ID NO: 7583 - protein, 7 aa, Artificial Sequence
  Description of Artificial Sequence: Synthetic peptide
MYSSSWY

SEQ ID NO: 7584 - protein, 7 aa, Artificial Sequence
  Description of Artificial Sequence: Synthetic peptide
GYSSSWS

SEQ ID NO: 7585 - protein, 7 aa, Artificial Sequence
  Description of Artificial Sequence: Synthetic peptide
IYDSSGY

SEQ ID NO: 7586 - protein, 7 aa, Artificial Sequence
  Description of Artificial Sequence: Synthetic peptide
PYDSSGS

SEQ ID NO: 7587 - protein, 7 aa, Artificial Sequence
  Description of Artificial Sequence: Synthetic peptide
VYDSSGF

SEQ ID NO: 7588 - protein, 7 aa, Artificial Sequence
  Description of Artificial Sequence: Synthetic peptide
PYDSSGY

SEQ ID NO: 7589 - protein, 7 aa, Artificial Sequence
  Description of Artificial Sequence: Synthetic peptide
NYDSSGS

SEQ ID NO: 7590 - protein, 7 aa, Artificial Sequence
  Description of Artificial Sequence: Synthetic peptide
LYDSSGY

SEQ ID NO: 7591 - protein, 7 aa, Artificial Sequence
  Description of Artificial Sequence: Synthetic peptide
NYDSSGY

SEQ ID NO: 7592 - protein, 7 aa, Artificial Sequence
  Description of Artificial Sequence: Synthetic peptide
LYDSSGS

SEQ ID NO: 7593 - protein, 7 aa, Artificial Sequence
  Description of Artificial Sequence: Synthetic peptide
VYDSSGY

SEQ ID NO: 7594 - protein, 7 aa, Artificial Sequence
  Description of Artificial Sequence: Synthetic peptide
VYDSSGS

SEQ ID NO: 7595 - protein, 7 aa, Artificial Sequence
  Description of Artificial Sequence: Synthetic peptide
LYDSSGF

SEQ ID NO: 7596 - protein, 7 aa, Artificial Sequence
  Description of Artificial Sequence: Synthetic peptide
NYDSSGF

SEQ ID NO: 7597 - protein, 7 aa, Artificial Sequence
  Description of Artificial Sequence: Synthetic peptide
YYDSSGS

SEQ ID NO: 7598 - protein, 7 aa, Artificial Sequence
  Description of Artificial Sequence: Synthetic peptide
DYDSSGS

SEQ ID NO: 7599 - protein, 7 aa, Artificial Sequence
  Description of Artificial Sequence: Synthetic peptide
TYDSSGY

SEQ ID NO: 7600 - protein, 7 aa, Artificial Sequence
  Description of Artificial Sequence: Synthetic peptide
TYDSSGF

SEQ ID NO: 7601 - protein, 7 aa, Artificial Sequence
  Description of Artificial Sequence: Synthetic peptide
TYDSSGS

SEQ ID NO: 7602 - protein, 7 aa, Artificial Sequence
  Description of Artificial Sequence: Synthetic peptide
YYDSSGF

SEQ ID NO: 7603 - protein, 7 aa, Artificial Sequence
  Description of Artificial Sequence: Synthetic peptide
AYDSSGS

SEQ ID NO: 7604 - protein, 7 aa, Artificial Sequence
  Description of Artificial Sequence: Synthetic peptide
HYDSSGY

SEQ ID NO: 7605 - protein, 7 aa, Artificial Sequence
  Description of Artificial Sequence: Synthetic peptide
AYDSSGY

SEQ ID NO: 7606 - protein, 7 aa, Artificial Sequence
  Description of Artificial Sequence: Synthetic peptide
HYDSSGF

SEQ ID NO: 7607 - protein, 7 aa, Artificial Sequence
  Description of Artificial Sequence: Synthetic peptide
HYDSSGS

SEQ ID NO: 7608 - protein, 7 aa, Artificial Sequence
  Description of Artificial Sequence: Synthetic peptide
FYDSSGF

SEQ ID NO: 7609 - protein, 7 aa, Artificial Sequence
  Description of Artificial Sequence: Synthetic peptide
IYDSSGF

SEQ ID NO: 7610 - protein, 7 aa, Artificial Sequence
  Description of Artificial Sequence: Synthetic peptide
DYDSSGY

SEQ ID NO: 7611 - protein, 7 aa, Artificial Sequence
  Description of Artificial Sequence: Synthetic peptide
DYDSSGF

SEQ ID NO: 7612 - protein, 7 aa, Artificial Sequence
  Description of Artificial Sequence: Synthetic peptide
PYDSSGF

SEQ ID NO: 7613 - protein, 7 aa, Artificial Sequence
  Description of Artificial Sequence: Synthetic peptide
SYDSSGS

SEQ ID NO: 7614 - protein, 7 aa, Artificial Sequence
  Description of Artificial Sequence: Synthetic peptide
SYDSSGF

SEQ ID NO: 7615 - protein, 7 aa, Artificial Sequence
  Description of Artificial Sequence: Synthetic peptide
AYDSSGF

SEQ ID NO: 7616 - protein, 7 aa, Artificial Sequence
  Description of Artificial Sequence: Synthetic peptide
FYDSSGY

SEQ ID NO: 7617 - protein, 7 aa, Artificial Sequence
  Description of Artificial Sequence: Synthetic peptide
SYDSSGY

SEQ ID NO: 7618 - protein, 7 aa, Artificial Sequence
  Description of Artificial Sequence: Synthetic peptide
IYDSSGS

SEQ ID NO: 7619 - protein, 7 aa, Artificial Sequence
  Description of Artificial Sequence: Synthetic peptide
FYDSSGS

SEQ ID NO: 7620 - protein, 7 aa, Artificial Sequence
  Description of Artificial Sequence: Synthetic peptide
HYYGSGI

SEQ ID NO: 7621 - protein, 7 aa, Artificial Sequence
  Description of Artificial Sequence: Synthetic peptide
SYYGSGI

SEQ ID NO: 7622 - protein, 7 aa, Artificial Sequence
  Description of Artificial Sequence: Synthetic peptide
AYYGSGT

SEQ ID NO: 7623 - protein, 7 aa, Artificial Sequence
  Description of Artificial Sequence: Synthetic peptide
DYYGSGI

SEQ ID NO: 7624 - protein, 7 aa, Artificial Sequence
  Description of Artificial Sequence: Synthetic peptide
VYYGSGT

SEQ ID NO: 7625 - protein, 7 aa, Artificial Sequence
  Description of Artificial Sequence: Synthetic peptide
AYYGSGS

SEQ ID NO: 7626 - protein, 7 aa, Artificial Sequence
  Description of Artificial Sequence: Synthetic peptide
VYYGSGI

SEQ ID NO: 7627 - protein, 7 aa, Artificial Sequence
  Description of Artificial Sequence: Synthetic peptide
VYYGSGS

SEQ ID NO: 7628 - protein, 7 aa, Artificial Sequence
  Description of Artificial Sequence: Synthetic peptide
HYYGSGS

SEQ ID NO: 7629 - protein, 7 aa, Artificial Sequence
  Description of Artificial Sequence: Synthetic peptide
LYYGSGS

SEQ ID NO: 7630 - protein, 7 aa, Artificial Sequence
  Description of Artificial Sequence: Synthetic peptide
HYYGSGT

SEQ ID NO: 7631 - protein, 7 aa, Artificial Sequence
  Description of Artificial Sequence: Synthetic peptide
LYYGSGT

SEQ ID NO: 7632 - protein, 7 aa, Artificial Sequence
  Description of Artificial Sequence: Synthetic peptide
PYYGSGS

SEQ ID NO: 7633 - protein, 7 aa, Artificial Sequence
  Description of Artificial Sequence: Synthetic peptide
SYYGSGS

SEQ ID NO: 7634 - protein, 7 aa, Artificial Sequence
  Description of Artificial Sequence: Synthetic peptide
NYYGSGS

SEQ ID NO: 7635 - protein, 7 aa, Artificial Sequence
  Description of Artificial Sequence: Synthetic peptide
IYYGSGS

SEQ ID NO: 7636 - protein, 7 aa, Artificial Sequence
  Description of Artificial Sequence: Synthetic peptide
DYYGSGT

SEQ ID NO: 7637 - protein, 7 aa, Artificial Sequence
  Description of Artificial Sequence: Synthetic peptide
PYYGSGI

SEQ ID NO: 7638 - protein, 7 aa, Artificial Sequence
  Description of Artificial Sequence: Synthetic peptide
PYYGSGT

SEQ ID NO: 7639 - protein, 7 aa, Artificial Sequence
  Description of Artificial Sequence: Synthetic peptide
SYYGSGT

SEQ ID NO: 7640 - protein, 7 aa, Artificial Sequence
  Description of Artificial Sequence: Synthetic peptide
FYYGSGS

SEQ ID NO: 7641 - protein, 7 aa, Artificial Sequence
  Description of Artificial Sequence: Synthetic peptide
NYYGSGT

SEQ ID NO: 7642 - protein, 7 aa, Artificial Sequence
  Description of Artificial Sequence: Synthetic peptide
IYYGSGT

SEQ ID NO: 7643 - protein, 7 aa, Artificial Sequence
  Description of Artificial Sequence: Synthetic peptide
DYYGSGS

SEQ ID NO: 7644 - protein, 7 aa, Artificial Sequence
  Description of Artificial Sequence: Synthetic peptide
TYYGSGS

SEQ ID NO: 7645 - protein, 7 aa, Artificial Sequence
  Description of Artificial Sequence: Synthetic peptide
FYYGSGT

SEQ ID NO: 7646 - protein, 7 aa, Artificial Sequence
  Description of Artificial Sequence: Synthetic peptide
YYYGSGT

SEQ ID NO: 7647 - protein, 7 aa, Artificial Sequence
  Description of Artificial Sequence: Synthetic peptide
TYYGSGT

SEQ ID NO: 7648 - protein, 7 aa, Artificial Sequence
  Description of Artificial Sequence: Synthetic peptide
YYYGSGI

SEQ ID NO: 7649 - protein, 7 aa, Artificial Sequence
  Description of Artificial Sequence: Synthetic peptide
FYYGSGI

SEQ ID NO: 7650 - protein, 7 aa, Artificial Sequence
  Description of Artificial Sequence: Synthetic peptide
AYYGSGI

SEQ ID NO: 7651 - protein, 7 aa, Artificial Sequence
  Description of Artificial Sequence: Synthetic peptide
TYYGSGI

SEQ ID NO: 7652 - protein, 7 aa, Artificial Sequence
  Description of Artificial Sequence: Synthetic peptide
IYYGSGI

SEQ ID NO: 7653 - protein, 7 aa, Artificial Sequence
  Description of Artificial Sequence: Synthetic peptide
LYYGSGI

SEQ ID NO: 7654 - protein, 7 aa, Artificial Sequence
  Description of Artificial Sequence: Synthetic peptide
NYYGSGI

SEQ ID NO: 7655 - protein, 7 aa, Artificial Sequence
  Description of Artificial Sequence: Synthetic peptide
TYSSGWF

SEQ ID NO: 7656 - protein, 7 aa, Artificial Sequence
  Description of Artificial Sequence: Synthetic peptide
TYSSGWS

SEQ ID NO: 7657 - protein, 7 aa, Artificial Sequence
  Description of Artificial Sequence: Synthetic peptide
VYSSGWF

SEQ ID NO: 7658 - protein, 7 aa, Artificial Sequence
  Description of Artificial Sequence: Synthetic peptide
GYSSGWF

SEQ ID NO: 7659 - protein, 7 aa, Artificial Sequence
  Description of Artificial Sequence: Synthetic peptide
MYSSGWS

SEQ ID NO: 7660 - protein, 7 aa, Artificial Sequence
  Description of Artificial Sequence: Synthetic peptide
SYSSGWF

SEQ ID NO: 7661 - protein, 7 aa, Artificial Sequence
  Description of Artificial Sequence: Synthetic peptide
MYSSGWY

SEQ ID NO: 7662 - protein, 7 aa, Artificial Sequence
  Description of Artificial Sequence: Synthetic peptide
LYSSGWY

SEQ ID NO: 7663 - protein, 7 aa, Artificial Sequence
  Description of Artificial Sequence: Synthetic peptide
MYSSGWF

SEQ ID NO: 7664 - protein, 7 aa, Artificial Sequence
  Description of Artificial Sequence: Synthetic peptide
WYSSGWS

SEQ ID NO: 7665 - protein, 7 aa, Artificial Sequence
  Description of Artificial Sequence: Synthetic peptide
WYSSGWY

SEQ ID NO: 7666 - protein, 7 aa, Artificial Sequence
  Description of Artificial Sequence: Synthetic peptide
AYSSGWS

SEQ ID NO: 7667 - protein, 7 aa, Artificial Sequence
  Description of Artificial Sequence: Synthetic peptide
RYSSGWF

SEQ ID NO: 7668 - protein, 7 aa, Artificial Sequence
  Description of Artificial Sequence: Synthetic peptide
LYSSGWF

SEQ ID NO: 7669 - protein, 7 aa, Artificial Sequence
  Description of Artificial Sequence: Synthetic peptide
AYSSGWY

SEQ ID NO: 7670 - protein, 7 aa, Artificial Sequence
  Description of Artificial Sequence: Synthetic peptide
RYSSGWY

SEQ ID NO: 7671 - protein, 7 aa, Artificial Sequence
  Description of Artificial Sequence: Synthetic peptide
SYSSGWY

SEQ ID NO: 7672 - protein, 7 aa, Artificial Sequence
  Description of Artificial Sequence: Synthetic peptide
RYSSGWS

SEQ ID NO: 7673 - protein, 7 aa, Artificial Sequence
  Description of Artificial Sequence: Synthetic peptide
WYSSGWF

SEQ ID NO: 7674 - protein, 7 aa, Artificial Sequence
  Description of Artificial Sequence: Synthetic peptide
AYSSGWF

SEQ ID NO: 7675 - protein, 7 aa, Artificial Sequence
  Description of Artificial Sequence: Synthetic peptide
GYSSGWS

SEQ ID NO: 7676 - protein, 7 aa, Artificial Sequence
  Description of Artificial Sequence: Synthetic peptide
VYSSGWY

SEQ ID NO: 7677 - protein, 7 aa, Artificial Sequence
  Description of Artificial Sequence: Synthetic peptide
VYSSGWS

SEQ ID NO: 7678 - protein, 7 aa, Artificial Sequence
  Description of Artificial Sequence: Synthetic peptide
LYSSGWS

SEQ ID NO: 7679 - protein, 7 aa, Artificial Sequence
  Description of Artificial Sequence: Synthetic peptide
TYSSGWY

SEQ ID NO: 7680 - protein, 7 aa, Artificial Sequence
  Description of Artificial Sequence: Synthetic peptide
SYSSGWS

SEQ ID NO: 7681 - protein, 7 aa, Artificial Sequence
  Description of Artificial Sequence: Synthetic peptide
FCSGGSC

SEQ ID NO: 7682 - protein, 7 aa, Artificial Sequence
  Description of Artificial Sequence: Synthetic peptide
LCSGGSC

SEQ ID NO: 7683 - protein, 7 aa, Artificial Sequence
  Description of Artificial Sequence: Synthetic peptide
SCSGGSC

SEQ ID NO: 7684 - protein, 7 aa, Artificial Sequence
  Description of Artificial Sequence: Synthetic peptide
DCSGGSC

SEQ ID NO: 7685 - protein, 7 aa, Artificial Sequence
  Description of Artificial Sequence: Synthetic peptide
HCSGGSC

SEQ ID NO: 7686 - protein, 7 aa, Artificial Sequence
  Description of Artificial Sequence: Synthetic peptide
PCSGGSC

SEQ ID NO: 7687 - protein, 7 aa, Artificial Sequence
  Description of Artificial Sequence: Synthetic peptide
ACSGGSC

SEQ ID NO: 7688 - protein, 7 aa, Artificial Sequence
  Description of Artificial Sequence: Synthetic peptide
VCSGGSC

SEQ ID NO: 7689 - protein, 7 aa, Artificial Sequence
  Description of Artificial Sequence: Synthetic peptide
CSGGSCH

SEQ ID NO: 7690 - protein, 7 aa, Artificial Sequence
  Description of Artificial Sequence: Synthetic peptide
CSGGSCL

SEQ ID NO: 7691 - protein, 7 aa, Artificial Sequence
  Description of Artificial Sequence: Synthetic peptide
CSGGSCS

SEQ ID NO: 7692 - protein, 7 aa, Artificial Sequence
  Description of Artificial Sequence: Synthetic peptide
CSGGSCP

SEQ ID NO: 7693 - protein, 7 aa, Artificial Sequence
  Description of Artificial Sequence: Synthetic peptide
CSGGSCF

SEQ ID NO: 7694 - protein, 7 aa, Artificial Sequence
  Description of Artificial Sequence: Synthetic peptide
CSSTSCL

SEQ ID NO: 7695 - protein, 7 aa, Artificial Sequence
  Description of Artificial Sequence: Synthetic peptide
CSSTSCF

SEQ ID NO: 7696 - protein, 7 aa, Artificial Sequence
  Description of Artificial Sequence: Synthetic peptide
CSSTSCH

SEQ ID NO: 7697 - protein, 7 aa, Artificial Sequence
  Description of Artificial Sequence: Synthetic peptide
CSSTSCS

SEQ ID NO: 7698 - protein, 7 aa, Artificial Sequence
  Description of Artificial Sequence: Synthetic peptide
CSSTSCP

SEQ ID NO: 7699 - protein, 7 aa, Artificial Sequence
  Description of Artificial Sequence: Synthetic peptide
ICGGDCF

SEQ ID NO: 7700 - protein, 7 aa, Artificial Sequence
  Description of Artificial Sequence: Synthetic peptide
VCGGDCS

SEQ ID NO: 7701 - protein, 7 aa, Artificial Sequence
  Description of Artificial Sequence: Synthetic peptide
DCGGDCF

SEQ ID NO: 7702 - protein, 7 aa, Artificial Sequence
  Description of Artificial Sequence: Synthetic peptide
SCGGDCF

SEQ ID NO: 7703 - protein, 7 aa, Artificial Sequence
  Description of Artificial Sequence: Synthetic peptide
NCGGDCY

SEQ ID NO: 7704 - protein, 7 aa, Artificial Sequence
  Description of Artificial Sequence: Synthetic peptide
VCGGDCY

SEQ ID NO: 7705 - protein, 7 aa, Artificial Sequence
  Description of Artificial Sequence: Synthetic peptide
SCGGDCS

SEQ ID NO: 7706 - protein, 7 aa, Artificial Sequence
  Description of Artificial Sequence: Synthetic peptide
NCGGDCS

SEQ ID NO: 7707 - protein, 7 aa, Artificial Sequence
  Description of Artificial Sequence: Synthetic peptide
HCGGDCF

SEQ ID NO: 7708 - protein, 7 aa, Artificial Sequence
  Description of Artificial Sequence: Synthetic peptide
LCGGDCS

SEQ ID NO: 7709 - protein, 7 aa, Artificial Sequence
  Description of Artificial Sequence: Synthetic peptide
LCGGDCY

SEQ ID NO: 7710 - protein, 7 aa, Artificial Sequence
  Description of Artificial Sequence: Synthetic peptide
ICGGDCY

SEQ ID NO: 7711 - protein, 7 aa, Artificial Sequence
  Description of Artificial Sequence: Synthetic peptide
LCGGDCF

SEQ ID NO: 7712 - protein, 7 aa, Artificial Sequence
  Description of Artificial Sequence: Synthetic peptide
ICGGDCS

SEQ ID NO: 7713 - protein, 7 aa, Artificial Sequence
  Description of Artificial Sequence: Synthetic peptide
VCGGDCF

SEQ ID NO: 7714 - protein, 7 aa, Artificial Sequence
  Description of Artificial Sequence: Synthetic peptide
HCGGDCS

SEQ ID NO: 7715 - protein, 7 aa, Artificial Sequence
  Description of Artificial Sequence: Synthetic peptide
YCGGDCF

SEQ ID NO: 7716 - protein, 7 aa, Artificial Sequence
  Description of Artificial Sequence: Synthetic peptide
HCGGDCY

SEQ ID NO: 7717 - protein, 7 aa, Artificial Sequence
  Description of Artificial Sequence: Synthetic peptide
FCGGDCF

SEQ ID NO: 7718 - protein, 7 aa, Artificial Sequence
  Description of Artificial Sequence: Synthetic peptide
YCGGDCS

SEQ ID NO: 7719 - protein, 7 aa, Artificial Sequence
  Description of Artificial Sequence: Synthetic peptide
DCGGDCS

SEQ ID NO: 7720 - protein, 7 aa, Artificial Sequence
  Description of Artificial Sequence: Synthetic peptide
DCGGDCY

SEQ ID NO: 7721 - protein, 7 aa, Artificial Sequence
  Description of Artificial Sequence: Synthetic peptide
PCGGDCF

SEQ ID NO: 7722 - protein, 7 aa, Artificial Sequence
  Description of Artificial Sequence: Synthetic peptide
FCGGDCS

SEQ ID NO: 7723 - protein, 7 aa, Artificial Sequence
  Description of Artificial Sequence: Synthetic peptide
FCGGDCY

SEQ ID NO: 7724 - protein, 7 aa, Artificial Sequence
  Description of Artificial Sequence: Synthetic peptide
ACGGDCF

SEQ ID NO: 7725 - protein, 7 aa, Artificial Sequence
  Description of Artificial Sequence: Synthetic peptide
ACGGDCY

SEQ ID NO: 7726 - protein, 7 aa, Artificial Sequence
  Description of Artificial Sequence: Synthetic peptide
ACGGDCS

SEQ ID NO: 7727 - protein, 7 aa, Artificial Sequence
  Description of Artificial Sequence: Synthetic peptide
PCGGDCY

SEQ ID NO: 7728 - protein, 7 aa, Artificial Sequence
  Description of Artificial Sequence: Synthetic peptide
PCGGDCS

SEQ ID NO: 7729 - protein, 7 aa, Artificial Sequence
  Description of Artificial Sequence: Synthetic peptide
SCGGDCY

SEQ ID NO: 7730 - protein, 7 aa, Artificial Sequence
  Description of Artificial Sequence: Synthetic peptide
NCGGDCF

SEQ ID NO: 7731 - protein, 7 aa, Artificial Sequence
  Description of Artificial Sequence: Synthetic peptide
TCGGDCS

SEQ ID NO: 7732 - protein, 7 aa, Artificial Sequence
  Description of Artificial Sequence: Synthetic peptide
TCGGDCY

SEQ ID NO: 7733 - protein, 7 aa, Artificial Sequence
  Description of Artificial Sequence: Synthetic peptide
TCGGDCF

SEQ ID NO: 7734 - protein, 7 aa, Artificial Sequence
  Description of Artificial Sequence: Synthetic peptide
NDFWSGF

SEQ ID NO: 7735 - protein, 7 aa, Artificial Sequence
  Description of Artificial Sequence: Synthetic peptide
HDFWSGF

SEQ ID NO: 7736 - protein, 7 aa, Artificial Sequence
  Description of Artificial Sequence: Synthetic peptide
SDFWSGF

SEQ ID NO: 7737 - protein, 7 aa, Artificial Sequence
  Description of Artificial Sequence: Synthetic peptide
NDFWSGY

SEQ ID NO: 7738 - protein, 7 aa, Artificial Sequence
  Description of Artificial Sequence: Synthetic peptide
HDFWSGS

SEQ ID NO: 7739 - protein, 7 aa, Artificial Sequence
  Description of Artificial Sequence: Synthetic peptide
DDFWSGF

SEQ ID NO: 7740 - protein, 7 aa, Artificial Sequence
  Description of Artificial Sequence: Synthetic peptide
HDFWSGY

SEQ ID NO: 7741 - protein, 7 aa, Artificial Sequence
  Description of Artificial Sequence: Synthetic peptide
SDFWSGY

SEQ ID NO: 7742 - protein, 7 aa, Artificial Sequence
  Description of Artificial Sequence: Synthetic peptide
FDFWSGF

SEQ ID NO: 7743 - protein, 7 aa, Artificial Sequence
  Description of Artificial Sequence: Synthetic peptide
PDFWSGY

SEQ ID NO: 7744 - protein, 7 aa, Artificial Sequence
  Description of Artificial Sequence: Synthetic peptide
IDFWSGF

SEQ ID NO: 7745 - protein, 7 aa, Artificial Sequence
  Description of Artificial Sequence: Synthetic peptide
SDFWSGS

SEQ ID NO: 7746 - protein, 7 aa, Artificial Sequence
  Description of Artificial Sequence: Synthetic peptide
PDFWSGS

SEQ ID NO: 7747 - protein, 7 aa, Artificial Sequence
  Description of Artificial Sequence: Synthetic peptide
TDFWSGF

SEQ ID NO: 7748 - protein, 7 aa, Artificial Sequence
  Description of Artificial Sequence: Synthetic peptide
LDFWSGS

SEQ ID NO: 7749 - protein, 7 aa, Artificial Sequence
  Description of Artificial Sequence: Synthetic peptide
DDFWSGY

SEQ ID NO: 7750 - protein, 7 aa, Artificial Sequence
  Description of Artificial Sequence: Synthetic peptide
LDFWSGY

SEQ ID NO: 7751 - protein, 7 aa, Artificial Sequence
  Description of Artificial Sequence: Synthetic peptide
FDFWSGS

SEQ ID NO: 7752 - protein, 7 aa, Artificial Sequence
  Description of Artificial Sequence: Synthetic peptide
ADFWSGF

SEQ ID NO: 7753 - protein, 7 aa, Artificial Sequence
  Description of Artificial Sequence: Synthetic peptide
FDFWSGY

SEQ ID NO: 7754 - protein, 7 aa, Artificial Sequence
  Description of Artificial Sequence: Synthetic peptide
TDFWSGS

SEQ ID NO: 7755 - protein, 7 aa, Artificial Sequence
  Description of Artificial Sequence: Synthetic peptide
PDFWSGF

SEQ ID NO: 7756 - protein, 7 aa, Artificial Sequence
  Description of Artificial Sequence: Synthetic peptide
VDFWSGF

SEQ ID NO: 7757 - protein, 7 aa, Artificial Sequence
  Description of Artificial Sequence: Synthetic peptide
TDFWSGY

SEQ ID NO: 7758 - protein, 7 aa, Artificial Sequence
  Description of Artificial Sequence: Synthetic peptide
IDFWSGY

SEQ ID NO: 7759 - protein, 7 aa, Artificial Sequence
  Description of Artificial Sequence: Synthetic peptide
DDFWSGS

SEQ ID NO: 7760 - protein, 7 aa, Artificial Sequence
  Description of Artificial Sequence: Synthetic peptide
YDFWSGS

SEQ ID NO: 7761 - protein, 7 aa, Artificial Sequence
  Description of Artificial Sequence: Synthetic peptide
YDFWSGF

SEQ ID NO: 7762 - protein, 7 aa, Artificial Sequence
  Description of Artificial Sequence: Synthetic peptide
IDFWSGS

SEQ ID NO: 7763 - protein, 7 aa, Artificial Sequence
  Description of Artificial Sequence: Synthetic peptide
NDFWSGS

SEQ ID NO: 7764 - protein, 7 aa, Artificial Sequence
  Description of Artificial Sequence: Synthetic peptide
LDFWSGF

SEQ ID NO: 7765 - protein, 7 aa, Artificial Sequence
  Description of Artificial Sequence: Synthetic peptide
ADFWSGY

SEQ ID NO: 7766 - protein, 7 aa, Artificial Sequence
  Description of Artificial Sequence: Synthetic peptide
VDFWSGS

SEQ ID NO: 7767 - protein, 7 aa, Artificial Sequence
  Description of Artificial Sequence: Synthetic peptide
ADFWSGS

SEQ ID NO: 7768 - protein, 7 aa, Artificial Sequence
  Description of Artificial Sequence: Synthetic peptide
VDFWSGY

SEQ ID NO: 7769 - protein, 7 aa, Artificial Sequence
  Description of Artificial Sequence: Synthetic peptide
YDSSGYS

SEQ ID NO: 7770 - protein, 7 aa, Artificial Sequence
  Description of Artificial Sequence: Synthetic peptide
VDSSGYF

SEQ ID NO: 7771 - protein, 7 aa, Artificial Sequence
  Description of Artificial Sequence: Synthetic peptide
VDSSGYS

SEQ ID NO: 7772 - protein, 7 aa, Artificial Sequence
  Description of Artificial Sequence: Synthetic peptide
ADSSGYS

SEQ ID NO: 7773 - protein, 7 aa, Artificial Sequence
  Description of Artificial Sequence: Synthetic peptide
HDSSGYF

SEQ ID NO: 7774 - protein, 7 aa, Artificial Sequence
  Description of Artificial Sequence: Synthetic peptide
ADSSGYY

SEQ ID NO: 7775 - protein, 7 aa, Artificial Sequence
  Description of Artificial Sequence: Synthetic peptide
DDSSGYY

SEQ ID NO: 7776 - protein, 7 aa, Artificial Sequence
  Description of Artificial Sequence: Synthetic peptide
DDSSGYS

SEQ ID NO: 7777 - protein, 7 aa, Artificial Sequence
  Description of Artificial Sequence: Synthetic peptide
SDSSGYS

SEQ ID NO: 7778 - protein, 7 aa, Artificial Sequence
  Description of Artificial Sequence: Synthetic peptide
SDSSGYF

SEQ ID NO: 7779 - protein, 7 aa, Artificial Sequence
  Description of Artificial Sequence: Synthetic peptide
PDSSGYS

SEQ ID NO: 7780 - protein, 7 aa, Artificial Sequence
  Description of Artificial Sequence: Synthetic peptide
SDSSGYY

SEQ ID NO: 7781 - protein, 7 aa, Artificial Sequence
  Description of Artificial Sequence: Synthetic peptide
PDSSGYY

SEQ ID NO: 7782 - protein, 7 aa, Artificial Sequence
  Description of Artificial Sequence: Synthetic peptide
HDSSGYY

SEQ ID NO: 7783 - protein, 7 aa, Artificial Sequence
  Description of Artificial Sequence: Synthetic peptide
PDSSGYF

SEQ ID NO: 7784 - protein, 7 aa, Artificial Sequence
  Description of Artificial Sequence: Synthetic peptide
FDSSGYF

SEQ ID NO: 7785 - protein, 7 aa, Artificial Sequence
  Description of Artificial Sequence: Synthetic peptide
HDSSGYS

SEQ ID NO: 7786 - protein, 7 aa, Artificial Sequence
  Description of Artificial Sequence: Synthetic peptide
ADSSGYF

SEQ ID NO: 7787 - protein, 7 aa, Artificial Sequence
  Description of Artificial Sequence: Synthetic peptide
DDSSGYF

SEQ ID NO: 7788 - protein, 7 aa, Artificial Sequence
  Description of Artificial Sequence: Synthetic peptide
LDSSGYF

SEQ ID NO: 7789 - protein, 7 aa, Artificial Sequence
  Description of Artificial Sequence: Synthetic peptide
LDSSGYY

SEQ ID NO: 7790 - protein, 7 aa, Artificial Sequence
  Description of Artificial Sequence: Synthetic peptide
LDSSGYS

SEQ ID NO: 7791 - protein, 7 aa, Artificial Sequence
  Description of Artificial Sequence: Synthetic peptide
FDSSGYY

SEQ ID NO: 7792 - protein, 7 aa, Artificial Sequence
  Description of Artificial Sequence: Synthetic peptide
FDSSGYS

SEQ ID NO: 7793 - protein, 7 aa, Artificial Sequence
  Description of Artificial Sequence: Synthetic peptide
YDSSGYF

SEQ ID NO: 7794 - protein, 7 aa, Artificial Sequence
  Description of Artificial Sequence: Synthetic peptide
VDSSGYY

SEQ ID NO: 7795 - protein, 7 aa, Artificial Sequence
  Description of Artificial Sequence: Synthetic peptide
EYCGGDC

SEQ ID NO: 7796 - protein, 7 aa, Artificial Sequence
  Description of Artificial Sequence: Synthetic peptide
QYCGGDC

SEQ ID NO: 7797 - protein, 7 aa, Artificial Sequence
  Description of Artificial Sequence: Synthetic peptide
IYCGGDC

SEQ ID NO: 7798 - protein, 7 aa, Artificial Sequence
  Description of Artificial Sequence: Synthetic peptide
TYCGGDC

SEQ ID NO: 7799 - protein, 7 aa, Artificial Sequence
  Description of Artificial Sequence: Synthetic peptide
PYCGGDC

SEQ ID NO: 7800 - protein, 7 aa, Artificial Sequence
  Description of Artificial Sequence: Synthetic peptide
LYCGGDC

SEQ ID NO: 7801 - protein, 7 aa, Artificial Sequence
  Description of Artificial Sequence: Synthetic peptide
VYCGGDC

SEQ ID NO: 7802 - protein, 7 aa, Artificial Sequence
  Description of Artificial Sequence: Synthetic peptide
KYCGGDC

SEQ ID NO: 7803 - protein, 8 aa, Artificial Sequence
  Description of Artificial Sequence: Synthetic peptide
VYYDSSGF

SEQ ID NO: 7804 - protein, 8 aa, Artificial Sequence
  Description of Artificial Sequence: Synthetic peptide
IYYDSSGF

SEQ ID NO: 7805 - protein, 8 aa, Artificial Sequence
  Description of Artificial Sequence: Synthetic peptide
PYYDSSGF

SEQ ID NO: 7806 - protein, 8 aa, Artificial Sequence
  Description of Artificial Sequence: Synthetic peptide
HYYDSSGF

SEQ ID NO: 7807 - protein, 8 aa, Artificial Sequence
  Description of Artificial Sequence: Synthetic peptide
HYYDSSGY

SEQ ID NO: 7808 - protein, 8 aa, Artificial Sequence
  Description of Artificial Sequence: Synthetic peptide
AYYDSSGF

SEQ ID NO: 7809 - protein, 8 aa, Artificial Sequence
  Description of Artificial Sequence: Synthetic peptide
HYYDSSGS

SEQ ID NO: 7810 - protein, 8 aa, Artificial Sequence
  Description of Artificial Sequence: Synthetic peptide
DYYDSSGY

SEQ ID NO: 7811 - protein, 8 aa, Artificial Sequence
  Description of Artificial Sequence: Synthetic peptide
DYYDSSGS

SEQ ID NO: 7812 - protein, 8 aa, Artificial Sequence
  Description of Artificial Sequence: Synthetic peptide
YYYDSSGS

SEQ ID NO: 7813 - protein, 8 aa, Artificial Sequence
  Description of Artificial Sequence: Synthetic peptide
SYYDSSGF

SEQ ID NO: 7814 - protein, 8 aa, Artificial Sequence
  Description of Artificial Sequence: Synthetic peptide
LYYDSSGF

SEQ ID NO: 7815 - protein, 8 aa, Artificial Sequence
  Description of Artificial Sequence: Synthetic peptide
NYYDSSGF

SEQ ID NO: 7816 - protein, 8 aa, Artificial Sequence
  Description of Artificial Sequence: Synthetic peptide
NYYDSSGY

SEQ ID NO: 7817 - protein, 8 aa, Artificial Sequence
  Description of Artificial Sequence: Synthetic peptide
IYYDSSGY

SEQ ID NO: 7818 - protein, 8 aa, Artificial Sequence
  Description of Artificial Sequence: Synthetic peptide
SYYDSSGS

SEQ ID NO: 7819 - protein, 8 aa, Artificial Sequence
  Description of Artificial Sequence: Synthetic peptide
AYYDSSGS

SEQ ID NO: 7820 - protein, 8 aa, Artificial Sequence
  Description of Artificial Sequence: Synthetic peptide
IYYDSSGS

SEQ ID NO: 7821 - protein, 8 aa, Artificial Sequence
  Description of Artificial Sequence: Synthetic peptide
AYYDSSGY

SEQ ID NO: 7822 - protein, 8 aa, Artificial Sequence
  Description of Artificial Sequence: Synthetic peptide
DYYDSSGF

SEQ ID NO: 7823 - protein, 8 aa, Artificial Sequence
  Description of Artificial Sequence: Synthetic peptide
SYYDSSGY

SEQ ID NO: 7824 - protein, 8 aa, Artificial Sequence
  Description of Artificial Sequence: Synthetic peptide
NYYDSSGS

SEQ ID NO: 7825 - protein, 8 aa, Artificial Sequence
  Description of Artificial Sequence: Synthetic peptide
LYYDSSGY

SEQ ID NO: 7826 - protein, 8 aa, Artificial Sequence
  Description of Artificial Sequence: Synthetic peptide
PYYDSSGS

SEQ ID NO: 7827 - protein, 8 aa, Artificial Sequence
  Description of Artificial Sequence: Synthetic peptide
LYYDSSGS

SEQ ID NO: 7828 - protein, 8 aa, Artificial Sequence
  Description of Artificial Sequence: Synthetic peptide
PYYDSSGY

SEQ ID NO: 7829 - protein, 8 aa, Artificial Sequence
  Description of Artificial Sequence: Synthetic peptide
TYYDSSGY

SEQ ID NO: 7830 - protein, 8 aa, Artificial Sequence
  Description of Artificial Sequence: Synthetic peptide
TYYDSSGS

SEQ ID NO: 7831 - protein, 8 aa, Artificial Sequence
  Description of Artificial Sequence: Synthetic peptide
FYYDSSGF

SEQ ID NO: 7832 - protein, 8 aa, Artificial Sequence
  Description of Artificial Sequence: Synthetic peptide
FYYDSSGY

SEQ ID NO: 7833 - protein, 8 aa, Artificial Sequence
  Description of Artificial Sequence: Synthetic peptide
FYYDSSGS

SEQ ID NO: 7834 - protein, 8 aa, Artificial Sequence
  Description of Artificial Sequence: Synthetic peptide
VYYDSSGS

SEQ ID NO: 7835 - protein, 8 aa, Artificial Sequence
  Description of Artificial Sequence: Synthetic peptide
TYYDSSGF

SEQ ID NO: 7836 - protein, 8 aa, Artificial Sequence
  Description of Artificial Sequence: Synthetic peptide
YYYDSSGF

SEQ ID NO: 7837 - protein, 8 aa, Artificial Sequence
  Description of Artificial Sequence: Synthetic peptide
VYYDSSGY

SEQ ID NO: 7838 - protein, 8 aa, Artificial Sequence
  Description of Artificial Sequence: Synthetic peptide
TYYGSGSS

SEQ ID NO: 7839 - protein, 8 aa, Artificial Sequence
  Description of Artificial Sequence: Synthetic peptide
SYYGSGSY

SEQ ID NO: 7840 - protein, 8 aa, Artificial Sequence
  Description of Artificial Sequence: Synthetic peptide
SYYGSGSS

SEQ ID NO: 7841 - protein, 8 aa, Artificial Sequence
  Description of Artificial Sequence: Synthetic peptide
HYYGSGSF

SEQ ID NO: 7842 - protein, 8 aa, Artificial Sequence
  Description of Artificial Sequence: Synthetic peptide
PYYGSGSF

SEQ ID NO: 7843 - protein, 8 aa, Artificial Sequence
  Description of Artificial Sequence: Synthetic peptide
AYYGSGSS

SEQ ID NO: 7844 - protein, 8 aa, Artificial Sequence
  Description of Artificial Sequence: Synthetic peptide
AYYGSGSF

SEQ ID NO: 7845 - protein, 8 aa, Artificial Sequence
  Description of Artificial Sequence: Synthetic peptide
AYYGSGSY

SEQ ID NO: 7846 - protein, 8 aa, Artificial Sequence
  Description of Artificial Sequence: Synthetic peptide
YYYGSGSF

SEQ ID NO: 7847 - protein, 8 aa, Artificial Sequence
  Description of Artificial Sequence: Synthetic peptide
TYYGSGSY

SEQ ID NO: 7848 - protein, 8 aa, Artificial Sequence
  Description of Artificial Sequence: Synthetic peptide
PYYGSGSS

SEQ ID NO: 7849 - protein, 8 aa, Artificial Sequence
  Description of Artificial Sequence: Synthetic peptide
PYYGSGSY

SEQ ID NO: 7850 - protein, 8 aa, Artificial Sequence
  Description of Artificial Sequence: Synthetic peptide
DYYGSGSY

SEQ ID NO: 7851 - protein, 8 aa, Artificial Sequence
  Description of Artificial Sequence: Synthetic peptide
VYYGSGSY

SEQ ID NO: 7852 - protein, 8 aa, Artificial Sequence
  Description of Artificial Sequence: Synthetic peptide
VYYGSGSF

SEQ ID NO: 7853 - protein, 8 aa, Artificial Sequence
  Description of Artificial Sequence: Synthetic peptide
YYYGSGSS

SEQ ID NO: 7854 - protein, 8 aa, Artificial Sequence
  Description of Artificial Sequence: Synthetic peptide
LYYGSGSF

SEQ ID NO: 7855 - protein, 8 aa, Artificial Sequence
  Description of Artificial Sequence: Synthetic peptide
LYYGSGSY

SEQ ID NO: 7856 - protein, 8 aa, Artificial Sequence
  Description of Artificial Sequence: Synthetic peptide
DYYGSGSS

SEQ ID NO: 7857 - protein, 8 aa, Artificial Sequence
  Description of Artificial Sequence: Synthetic peptide
VYYGSGSS

SEQ ID NO: 7858 - protein, 8 aa, Artificial Sequence
  Description of Artificial Sequence: Synthetic peptide
IYYGSGSS

SEQ ID NO: 7859 - protein, 8 aa, Artificial Sequence
  Description of Artificial Sequence: Synthetic peptide
FYYGSGSY

SEQ ID NO: 7860 - protein, 8 aa, Artificial Sequence
  Description of Artificial Sequence: Synthetic peptide
FYYGSGSS

SEQ ID NO: 7861 - protein, 8 aa, Artificial Sequence
  Description of Artificial Sequence: Synthetic peptide
LYYGSGSS

SEQ ID NO: 7862 - protein, 8 aa, Artificial Sequence
  Description of Artificial Sequence: Synthetic peptide
SYYGSGSF

SEQ ID NO: 7863 - protein, 8 aa, Artificial Sequence
  Description of Artificial Sequence: Synthetic peptide
IYYGSGSY

SEQ ID NO: 7864 - protein, 8 aa, Artificial Sequence
  Description of Artificial Sequence: Synthetic peptide
IYYGSGSF

SEQ ID NO: 7865 - protein, 8 aa, Artificial Sequence
  Description of Artificial Sequence: Synthetic peptide
FYYGSGSF

SEQ ID NO: 7866 - protein, 8 aa, Artificial Sequence
  Description of Artificial Sequence: Synthetic peptide
DYYGSGSF

SEQ ID NO: 7867 - protein, 8 aa, Artificial Sequence
  Description of Artificial Sequence: Synthetic peptide
NYYGSGSS

SEQ ID NO: 7868 - protein, 8 aa, Artificial Sequence
  Description of Artificial Sequence: Synthetic peptide
NYYGSGSY

SEQ ID NO: 7869 - protein, 8 aa, Artificial Sequence
  Description of Artificial Sequence: Synthetic peptide
TYYGSGSF

SEQ ID NO: 7870 - protein, 8 aa, Artificial Sequence
  Description of Artificial Sequence: Synthetic peptide
HYYGSGSY

SEQ ID NO: 7871 - protein, 8 aa, Artificial Sequence
  Description of Artificial Sequence: Synthetic peptide
HYYGSGSS

SEQ ID NO: 7872 - protein, 8 aa, Artificial Sequence
  Description of Artificial Sequence: Synthetic peptide
NYYGSGSF

SEQ ID NO: 7873 - protein, 8 aa, Artificial Sequence
  Description of Artificial Sequence: Synthetic peptide
AYCSSTSC

SEQ ID NO: 7874 - protein, 8 aa, Artificial Sequence
  Description of Artificial Sequence: Synthetic peptide
PYCSSTSC

SEQ ID NO: 7875 - protein, 8 aa, Artificial Sequence
  Description of Artificial Sequence: Synthetic peptide
RYCSSTSC

SEQ ID NO: 7876 - protein, 8 aa, Artificial Sequence
  Description of Artificial Sequence: Synthetic peptide
IYCSSTSC

SEQ ID NO: 7877 - protein, 8 aa, Artificial Sequence
  Description of Artificial Sequence: Synthetic peptide
LYCSSTSC

SEQ ID NO: 7878 - protein, 8 aa, Artificial Sequence
  Description of Artificial Sequence: Synthetic peptide
VYCSSTSC

SEQ ID NO: 7879 - protein, 8 aa, Artificial Sequence
  Description of Artificial Sequence: Synthetic peptide
TYCSSTSC

SEQ ID NO: 7880 - protein, 8 aa, Artificial Sequence
  Description of Artificial Sequence: Synthetic peptide
SYCSSTSC

SEQ ID NO: 7881 - protein, 8 aa, Artificial Sequence
  Description of Artificial Sequence: Synthetic peptide
IYCSGGSC

SEQ ID NO: 7882 - protein, 8 aa, Artificial Sequence
  Description of Artificial Sequence: Synthetic peptide
VYCSGGSC

SEQ ID NO: 7883 - protein, 8 aa, Artificial Sequence
  Description of Artificial Sequence: Synthetic peptide
LYCSGGSC

SEQ ID NO: 7884 - protein, 8 aa, Artificial Sequence
  Description of Artificial Sequence: Synthetic peptide
AYCSGGSC

SEQ ID NO: 7885 - protein, 8 aa, Artificial Sequence
  Description of Artificial Sequence: Synthetic peptide
TYCSGGSC

SEQ ID NO: 7886 - protein, 8 aa, Artificial Sequence
  Description of Artificial Sequence: Synthetic peptide
RYCSGGSC

SEQ ID NO: 7887 - protein, 8 aa, Artificial Sequence
  Description of Artificial Sequence: Synthetic peptide
PYCSGGSC

SEQ ID NO: 7888 - protein, 8 aa, Artificial Sequence
  Description of Artificial Sequence: Synthetic peptide
SYCSGGSC

SEQ ID NO: 7889 - protein, 8 aa, Artificial Sequence
  Description of Artificial Sequence: Synthetic peptide
FYDFWSGY

SEQ ID NO: 7890 - protein, 8 aa, Artificial Sequence
  Description of Artificial Sequence: Synthetic peptide
AYDFWSGF

SEQ ID NO: 7891 - protein, 8 aa, Artificial Sequence
  Description of Artificial Sequence: Synthetic peptide
NYDFWSGF

SEQ ID NO: 7892 - protein, 8 aa, Artificial Sequence
  Description of Artificial Sequence: Synthetic peptide
IYDFWSGF

SEQ ID NO: 7893 - protein, 8 aa, Artificial Sequence
  Description of Artificial Sequence: Synthetic peptide
DYDFWSGS

SEQ ID NO: 7894 - protein, 8 aa, Artificial Sequence
  Description of Artificial Sequence: Synthetic peptide
DYDFWSGY

SEQ ID NO: 7895 - protein, 8 aa, Artificial Sequence
  Description of Artificial Sequence: Synthetic peptide
NYDFWSGY

SEQ ID NO: 7896 - protein, 8 aa, Artificial Sequence
  Description of Artificial Sequence: Synthetic peptide
VYDFWSGF

SEQ ID NO: 7897 - protein, 8 aa, Artificial Sequence
  Description of Artificial Sequence: Synthetic peptide
VYDFWSGS

SEQ ID NO: 7898 - protein, 8 aa, Artificial Sequence
  Description of Artificial Sequence: Synthetic peptide
YYDFWSGF

SEQ ID NO: 7899 - protein, 8 aa, Artificial Sequence
  Description of Artificial Sequence: Synthetic peptide
PYDFWSGF

SEQ ID NO: 7900 - protein, 8 aa, Artificial Sequence
  Description of Artificial Sequence: Synthetic peptide
FYDFWSGS

SEQ ID NO: 7901 - protein, 8 aa, Artificial Sequence
  Description of Artificial Sequence: Synthetic peptide
HYDFWSGF

SEQ ID NO: 7902 - protein, 8 aa, Artificial Sequence
  Description of Artificial Sequence: Synthetic peptide
HYDFWSGY

SEQ ID NO: 7903 - protein, 8 aa, Artificial Sequence
  Description of Artificial Sequence: Synthetic peptide
YYDFWSGS

SEQ ID NO: 7904 - protein, 8 aa, Artificial Sequence
  Description of Artificial Sequence: Synthetic peptide
PYDFWSGY

SEQ ID NO: 7905 - protein, 8 aa, Artificial Sequence
  Description of Artificial Sequence: Synthetic peptide
PYDFWSGS

SEQ ID NO: 7906 - protein, 8 aa, Artificial Sequence
  Description of Artificial Sequence: Synthetic peptide
VYDFWSGY

SEQ ID NO: 7907 - protein, 8 aa, Artificial Sequence
  Description of Artificial Sequence: Synthetic peptide
SYDFWSGS

SEQ ID NO: 7908 - protein, 8 aa, Artificial Sequence
  Description of Artificial Sequence: Synthetic peptide
LYDFWSGF

SEQ ID NO: 7909 - protein, 8 aa, Artificial Sequence
  Description of Artificial Sequence: Synthetic peptide
HYDFWSGS

SEQ ID NO: 7910 - protein, 8 aa, Artificial Sequence
  Description of Artificial Sequence: Synthetic peptide
SYDFWSGY

SEQ ID NO: 7911 - protein, 8 aa, Artificial Sequence
  Description of Artificial Sequence: Synthetic peptide
SYDFWSGF

SEQ ID NO: 7912 - protein, 8 aa, Artificial Sequence
  Description of Artificial Sequence: Synthetic peptide
LYDFWSGS

SEQ ID NO: 7913 - protein, 8 aa, Artificial Sequence
  Description of Artificial Sequence: Synthetic peptide
TYDFWSGF

SEQ ID NO: 7914 - protein, 8 aa, Artificial Sequence
  Description of Artificial Sequence: Synthetic peptide
LYDFWSGY

SEQ ID NO: 7915 - protein, 8 aa, Artificial Sequence
  Description of Artificial Sequence: Synthetic peptide
AYDFWSGY

SEQ ID NO: 7916 - protein, 8 aa, Artificial Sequence
  Description of Artificial Sequence: Synthetic peptide
AYDFWSGS

SEQ ID NO: 7917 - protein, 8 aa, Artificial Sequence
  Description of Artificial Sequence: Synthetic peptide
TYDFWSGS

SEQ ID NO: 7918 - protein, 8 aa, Artificial Sequence
  Description of Artificial Sequence: Synthetic peptide
IYDFWSGY

SEQ ID NO: 7919 - protein, 8 aa, Artificial Sequence
  Description of Artificial Sequence: Synthetic peptide
TYDFWSGY

SEQ ID NO: 7920 - protein, 8 aa, Artificial Sequence
  Description of Artificial Sequence: Synthetic peptide
NYDFWSGS

SEQ ID NO: 7921 - protein, 8 aa, Artificial Sequence
  Description of Artificial Sequence: Synthetic peptide
DYDFWSGF

SEQ ID NO: 7922 - protein, 8 aa, Artificial Sequence
  Description of Artificial Sequence: Synthetic peptide
IYDFWSGS

SEQ ID NO: 7923 - protein, 8 aa, Artificial Sequence
  Description of Artificial Sequence: Synthetic peptide
FYDFWSGF

SEQ ID NO: 7924 - protein, 8 aa, Artificial Sequence
  Description of Artificial Sequence: Synthetic peptide
HDILTGYS

SEQ ID NO: 7925 - protein, 8 aa, Artificial Sequence
  Description of Artificial Sequence: Synthetic peptide
PDILTGYY

SEQ ID NO: 7926 - protein, 8 aa, Artificial Sequence
  Description of Artificial Sequence: Synthetic peptide
PDILTGYF

SEQ ID NO: 7927 - protein, 8 aa, Artificial Sequence
  Description of Artificial Sequence: Synthetic peptide
TDILTGYS

SEQ ID NO: 7928 - protein, 8 aa, Artificial Sequence
  Description of Artificial Sequence: Synthetic peptide
HDILTGYY

SEQ ID NO: 7929 - protein, 8 aa, Artificial Sequence
  Description of Artificial Sequence: Synthetic peptide
YDILTGYF

SEQ ID NO: 7930 - protein, 8 aa, Artificial Sequence
  Description of Artificial Sequence: Synthetic peptide
IDILTGYS

SEQ ID NO: 7931 - protein, 8 aa, Artificial Sequence
  Description of Artificial Sequence: Synthetic peptide
IDILTGYY

SEQ ID NO: 7932 - protein, 8 aa, Artificial Sequence
  Description of Artificial Sequence: Synthetic peptide
IDILTGYF

SEQ ID NO: 7933 - protein, 8 aa, Artificial Sequence
  Description of Artificial Sequence: Synthetic peptide
LDILTGYF

SEQ ID NO: 7934 - protein, 8 aa, Artificial Sequence
  Description of Artificial Sequence: Synthetic peptide
LDILTGYY

SEQ ID NO: 7935 - protein, 8 aa, Artificial Sequence
  Description of Artificial Sequence: Synthetic peptide
LDILTGYS

SEQ ID NO: 7936 - protein, 8 aa, Artificial Sequence
  Description of Artificial Sequence: Synthetic peptide
DDILTGYF

SEQ ID NO: 7937 - protein, 8 aa, Artificial Sequence
  Description of Artificial Sequence: Synthetic peptide
FDILTGYF

SEQ ID NO: 7938 - protein, 8 aa, Artificial Sequence
  Description of Artificial Sequence: Synthetic peptide
SDILTGYF

SEQ ID NO: 7939 - protein, 8 aa, Artificial Sequence
  Description of Artificial Sequence: Synthetic peptide
ADILTGYY

SEQ ID NO: 7940 - protein, 8 aa, Artificial Sequence
  Description of Artificial Sequence: Synthetic peptide
VDILTGYY

SEQ ID NO: 7941 - protein, 8 aa, Artificial Sequence
  Description of Artificial Sequence: Synthetic peptide
VDILTGYS

SEQ ID NO: 7942 - protein, 8 aa, Artificial Sequence
  Description of Artificial Sequence: Synthetic peptide
ADILTGYS

SEQ ID NO: 7943 - protein, 8 aa, Artificial Sequence
  Description of Artificial Sequence: Synthetic peptide
DDILTGYS

SEQ ID NO: 7944 - protein, 8 aa, Artificial Sequence
  Description of Artificial Sequence: Synthetic peptide
FDILTGYS

SEQ ID NO: 7945 - protein, 8 aa, Artificial Sequence
  Description of Artificial Sequence: Synthetic peptide
SDILTGYS

SEQ ID NO: 7946 - protein, 8 aa, Artificial Sequence
  Description of Artificial Sequence: Synthetic peptide
DDILTGYY

SEQ ID NO: 7947 - protein, 8 aa, Artificial Sequence
  Description of Artificial Sequence: Synthetic peptide
SDILTGYY

SEQ ID NO: 7948 - protein, 8 aa, Artificial Sequence
  Description of Artificial Sequence: Synthetic peptide
FDILTGYY

SEQ ID NO: 7949 - protein, 8 aa, Artificial Sequence
  Description of Artificial Sequence: Synthetic peptide
HDILTGYF

SEQ ID NO: 7950 - protein, 8 aa, Artificial Sequence
  Description of Artificial Sequence: Synthetic peptide
NDILTGYY

SEQ ID NO: 7951 - protein, 8 aa, Artificial Sequence
  Description of Artificial Sequence: Synthetic peptide
NDILTGYF

SEQ ID NO: 7952 - protein, 8 aa, Artificial Sequence
  Description of Artificial Sequence: Synthetic peptide
PDILTGYS

SEQ ID NO: 7953 - protein, 8 aa, Artificial Sequence
  Description of Artificial Sequence: Synthetic peptide
VDILTGYF

SEQ ID NO: 7954 - protein, 8 aa, Artificial Sequence
  Description of Artificial Sequence: Synthetic peptide
TDILTGYY

SEQ ID NO: 7955 - protein, 8 aa, Artificial Sequence
  Description of Artificial Sequence: Synthetic peptide
TDILTGYF

SEQ ID NO: 7956 - protein, 8 aa, Artificial Sequence
  Description of Artificial Sequence: Synthetic peptide
YDILTGYS

SEQ ID NO: 7957 - protein, 8 aa, Artificial Sequence
  Description of Artificial Sequence: Synthetic peptide
NDILTGYS

SEQ ID NO: 7958 - protein, 8 aa, Artificial Sequence
  Description of Artificial Sequence: Synthetic peptide
ADILTGYF

SEQ ID NO: 7959 - protein, 8 aa, Artificial Sequence
  Description of Artificial Sequence: Synthetic peptide
SCSGGSCS

SEQ ID NO: 7960 - protein, 8 aa, Artificial Sequence
  Description of Artificial Sequence: Synthetic peptide
HCSGGSCF

SEQ ID NO: 7961 - protein, 8 aa, Artificial Sequence
  Description of Artificial Sequence: Synthetic peptide
DCSGGSCS

SEQ ID NO: 7962 - protein, 8 aa, Artificial Sequence
  Description of Artificial Sequence: Synthetic peptide
PCSGGSCF

SEQ ID NO: 7963 - protein, 8 aa, Artificial Sequence
  Description of Artificial Sequence: Synthetic peptide
PCSGGSCY

SEQ ID NO: 7964 - protein, 8 aa, Artificial Sequence
  Description of Artificial Sequence: Synthetic peptide
SCSGGSCY

SEQ ID NO: 7965 - protein, 8 aa, Artificial Sequence
  Description of Artificial Sequence: Synthetic peptide
PCSGGSCS

SEQ ID NO: 7966 - protein, 8 aa, Artificial Sequence
  Description of Artificial Sequence: Synthetic peptide
LCSGGSCY

SEQ ID NO: 7967 - protein, 8 aa, Artificial Sequence
  Description of Artificial Sequence: Synthetic peptide
ACSGGSCY

SEQ ID NO: 7968 - protein, 8 aa, Artificial Sequence
  Description of Artificial Sequence: Synthetic peptide
ACSGGSCS

SEQ ID NO: 7969 - protein, 8 aa, Artificial Sequence
  Description of Artificial Sequence: Synthetic peptide
ACSGGSCF

SEQ ID NO: 7970 - protein, 8 aa, Artificial Sequence
  Description of Artificial Sequence: Synthetic peptide
VCSGGSCY

SEQ ID NO: 7971 - protein, 8 aa, Artificial Sequence
  Description of Artificial Sequence: Synthetic peptide
VCSGGSCF

SEQ ID NO: 7972 - protein, 8 aa, Artificial Sequence
  Description of Artificial Sequence: Synthetic peptide
VCSGGSCS

SEQ ID NO: 7973 - protein, 8 aa, Artificial Sequence
  Description of Artificial Sequence: Synthetic peptide
YCSGGSCS

SEQ ID NO: 7974 - protein, 8 aa, Artificial Sequence
  Description of Artificial Sequence: Synthetic peptide
YCSGGSCF

SEQ ID NO: 7975 - protein, 8 aa, Artificial Sequence
  Description of Artificial Sequence: Synthetic peptide
DCSGGSCF

SEQ ID NO: 7976 - protein, 8 aa, Artificial Sequence
  Description of Artificial Sequence: Synthetic peptide
DCSGGSCY

SEQ ID NO: 7977 - protein, 8 aa, Artificial Sequence
  Description of Artificial Sequence: Synthetic peptide
FCSGGSCS

SEQ ID NO: 7978 - protein, 8 aa, Artificial Sequence
  Description of Artificial Sequence: Synthetic peptide
FCSGGSCY

SEQ ID NO: 7979 - protein, 8 aa, Artificial Sequence
  Description of Artificial Sequence: Synthetic peptide
FCSGGSCF

SEQ ID NO: 7980 - protein, 8 aa, Artificial Sequence
  Description of Artificial Sequence: Synthetic peptide
SCSGGSCF

SEQ ID NO: 7981 - protein, 8 aa, Artificial Sequence
  Description of Artificial Sequence: Synthetic peptide
LCSGGSCF

SEQ ID NO: 7982 - protein, 8 aa, Artificial Sequence
  Description of Artificial Sequence: Synthetic peptide
LCSGGSCS

SEQ ID NO: 7983 - protein, 8 aa, Artificial Sequence
  Description of Artificial Sequence: Synthetic peptide
HCSGGSCS

SEQ ID NO: 7984 - protein, 8 aa, Artificial Sequence
  Description of Artificial Sequence: Synthetic peptide
HCSGGSCY

SEQ ID NO: 7985 - protein, 8 aa, Artificial Sequence
  Description of Artificial Sequence: Synthetic peptide
ACSSTSCY

SEQ ID NO: 7986 - protein, 8 aa, Artificial Sequence
  Description of Artificial Sequence: Synthetic peptide
YCSSTSCF

SEQ ID NO: 7987 - protein, 8 aa, Artificial Sequence
  Description of Artificial Sequence: Synthetic peptide
FCSSTSCY

SEQ ID NO: 7988 - protein, 8 aa, Artificial Sequence
  Description of Artificial Sequence: Synthetic peptide
PCSSTSCF

SEQ ID NO: 7989 - protein, 8 aa, Artificial Sequence
  Description of Artificial Sequence: Synthetic peptide
FCSSTSCS

SEQ ID NO: 7990 - protein, 8 aa, Artificial Sequence
  Description of Artificial Sequence: Synthetic peptide
DCSSTSCF

SEQ ID NO: 7991 - protein, 8 aa, Artificial Sequence
  Description of Artificial Sequence: Synthetic peptide
VCSSTSCS

SEQ ID NO: 7992 - protein, 8 aa, Artificial Sequence
  Description of Artificial Sequence: Synthetic peptide
VCSSTSCF

SEQ ID NO: 7993 - protein, 8 aa, Artificial Sequence
  Description of Artificial Sequence: Synthetic peptide
LCSSTSCS

SEQ ID NO: 7994 - protein, 8 aa, Artificial Sequence
  Description of Artificial Sequence: Synthetic peptide
VCSSTSCY

SEQ ID NO: 7995 - protein, 8 aa, Artificial Sequence
  Description of Artificial Sequence: Synthetic peptide
ACSSTSCS

SEQ ID NO: 7996 - protein, 8 aa, Artificial Sequence
  Description of Artificial Sequence: Synthetic peptide
LCSSTSCY

SEQ ID NO: 7997 - protein, 8 aa, Artificial Sequence
  Description of Artificial Sequence: Synthetic peptide
LCSSTSCF

SEQ ID NO: 7998 - protein, 8 aa, Artificial Sequence
  Description of Artificial Sequence: Synthetic peptide
FCSSTSCF

SEQ ID NO: 7999 - protein, 8 aa, Artificial Sequence
  Description of Artificial Sequence: Synthetic peptide
HCSSTSCY

SEQ ID NO: 8000 - protein, 8 aa, Artificial Sequence
  Description of Artificial Sequence: Synthetic peptide
HCSSTSCS

SEQ ID NO: 8001 - protein, 8 aa, Artificial Sequence
  Description of Artificial Sequence: Synthetic peptide
HCSSTSCF

SEQ ID NO: 8002 - protein, 8 aa, Artificial Sequence
  Description of Artificial Sequence: Synthetic peptide
SCSSTSCF

SEQ ID NO: 8003 - protein, 8 aa, Artificial Sequence
  Description of Artificial Sequence: Synthetic peptide
SCSSTSCS

SEQ ID NO: 8004 - protein, 8 aa, Artificial Sequence
  Description of Artificial Sequence: Synthetic peptide
YCSSTSCS

SEQ ID NO: 8005 - protein, 8 aa, Artificial Sequence
  Description of Artificial Sequence: Synthetic peptide
DCSSTSCY

SEQ ID NO: 8006 - protein, 8 aa, Artificial Sequence
  Description of Artificial Sequence: Synthetic peptide
DCSSTSCS

SEQ ID NO: 8007 - protein, 8 aa, Artificial Sequence
  Description of Artificial Sequence: Synthetic peptide
SCSSTSCY

SEQ ID NO: 8008 - protein, 8 aa, Artificial Sequence
  Description of Artificial Sequence: Synthetic peptide
PCSSTSCS

SEQ ID NO: 8009 - protein, 8 aa, Artificial Sequence
  Description of Artificial Sequence: Synthetic peptide
ACSSTSCF

SEQ ID NO: 8010 - protein, 8 aa, Artificial Sequence
  Description of Artificial Sequence: Synthetic peptide
PCSSTSCY

SEQ ID NO: 8011 - protein, 8 aa, Artificial Sequence
  Description of Artificial Sequence: Synthetic peptide
LYCGGDCS

SEQ ID NO: 8012 - protein, 8 aa, Artificial Sequence
  Description of Artificial Sequence: Synthetic peptide
EYCGGDCS

SEQ ID NO: 8013 - protein, 8 aa, Artificial Sequence
  Description of Artificial Sequence: Synthetic peptide
LYCGGDCY

SEQ ID NO: 8014 - protein, 8 aa, Artificial Sequence
  Description of Artificial Sequence: Synthetic peptide
VYCGGDCS

SEQ ID NO: 8015 - protein, 8 aa, Artificial Sequence
  Description of Artificial Sequence: Synthetic peptide
VYCGGDCY

SEQ ID NO: 8016 - protein, 8 aa, Artificial Sequence
  Description of Artificial Sequence: Synthetic peptide
AYCGGDCF

SEQ ID NO: 8017 - protein, 8 aa, Artificial Sequence
  Description of Artificial Sequence: Synthetic peptide
EYCGGDCY

SEQ ID NO: 8018 - protein, 8 aa, Artificial Sequence
  Description of Artificial Sequence: Synthetic peptide
TYCGGDCF

SEQ ID NO: 8019 - protein, 8 aa, Artificial Sequence
  Description of Artificial Sequence: Synthetic peptide
LYCGGDCF

SEQ ID NO: 8020 - protein, 8 aa, Artificial Sequence
  Description of Artificial Sequence: Synthetic peptide
AYCGGDCS

SEQ ID NO: 8021 - protein, 8 aa, Artificial Sequence
  Description of Artificial Sequence: Synthetic peptide
QYCGGDCF

SEQ ID NO: 8022 - protein, 8 aa, Artificial Sequence
  Description of Artificial Sequence: Synthetic peptide
QYCGGDCS

SEQ ID NO: 8023 - protein, 8 aa, Artificial Sequence
  Description of Artificial Sequence: Synthetic peptide
KYCGGDCF

SEQ ID NO: 8024 - protein, 8 aa, Artificial Sequence
  Description of Artificial Sequence: Synthetic peptide
KYCGGDCY

SEQ ID NO: 8025 - protein, 8 aa, Artificial Sequence
  Description of Artificial Sequence: Synthetic peptide
QYCGGDCY

SEQ ID NO: 8026 - protein, 8 aa, Artificial Sequence
  Description of Artificial Sequence: Synthetic peptide
KYCGGDCS

SEQ ID NO: 8027 - protein, 8 aa, Artificial Sequence
  Description of Artificial Sequence: Synthetic peptide
VYCGGDCF

SEQ ID NO: 8028 - protein, 8 aa, Artificial Sequence
  Description of Artificial Sequence: Synthetic peptide
IYCGGDCF

SEQ ID NO: 8029 - protein, 8 aa, Artificial Sequence
  Description of Artificial Sequence: Synthetic peptide
IYCGGDCY

SEQ ID NO: 8030 - protein, 8 aa, Artificial Sequence
  Description of Artificial Sequence: Synthetic peptide
IYCGGDCS

SEQ ID NO: 8031 - protein, 8 aa, Artificial Sequence
  Description of Artificial Sequence: Synthetic peptide
PYCGGDCS

SEQ ID NO: 8032 - protein, 8 aa, Artificial Sequence
  Description of Artificial Sequence: Synthetic peptide
PYCGGDCF

SEQ ID NO: 8033 - protein, 8 aa, Artificial Sequence
  Description of Artificial Sequence: Synthetic peptide
TYCGGDCY

SEQ ID NO: 8034 - protein, 8 aa, Artificial Sequence
  Description of Artificial Sequence: Synthetic peptide
EYCGGDCF

SEQ ID NO: 8035 - protein, 8 aa, Artificial Sequence
  Description of Artificial Sequence: Synthetic peptide
PYCGGDCY

SEQ ID NO: 8036 - protein, 8 aa, Artificial Sequence
  Description of Artificial Sequence: Synthetic peptide
TYCGGDCS

SEQ ID NO: 8037 - protein, 8 aa, Artificial Sequence
  Description of Artificial Sequence: Synthetic peptide
DYDSSGYS

SEQ ID NO: 8038 - protein, 8 aa, Artificial Sequence
  Description of Artificial Sequence: Synthetic peptide
YYDSSGYF

SEQ ID NO: 8039 - protein, 8 aa, Artificial Sequence
  Description of Artificial Sequence: Synthetic peptide
LYDSSGYS

SEQ ID NO: 8040 - protein, 8 aa, Artificial Sequence
  Description of Artificial Sequence: Synthetic peptide
AYDSSGYS

SEQ ID NO: 8041 - protein, 8 aa, Artificial Sequence
  Description of Artificial Sequence: Synthetic peptide
AYDSSGYY

SEQ ID NO: 8042 - protein, 8 aa, Artificial Sequence
  Description of Artificial Sequence: Synthetic peptide
NYDSSGYY

SEQ ID NO: 8043 - protein, 8 aa, Artificial Sequence
  Description of Artificial Sequence: Synthetic peptide
IYDSSGYS

SEQ ID NO: 8044 - protein, 8 aa, Artificial Sequence
  Description of Artificial Sequence: Synthetic peptide
FYDSSGYF

SEQ ID NO: 8045 - protein, 8 aa, Artificial Sequence
  Description of Artificial Sequence: Synthetic peptide
DYDSSGYY

SEQ ID NO: 8046 - protein, 8 aa, Artificial Sequence
  Description of Artificial Sequence: Synthetic peptide
YYDSSGYS

SEQ ID NO: 8047 - protein, 8 aa, Artificial Sequence
  Description of Artificial Sequence: Synthetic peptide
TYDSSGYY

SEQ ID NO: 8048 - protein, 8 aa, Artificial Sequence
  Description of Artificial Sequence: Synthetic peptide
TYDSSGYS

SEQ ID NO: 8049 - protein, 8 aa, Artificial Sequence
  Description of Artificial Sequence: Synthetic peptide
PYDSSGYF

SEQ ID NO: 8050 - protein, 8 aa, Artificial Sequence
  Description of Artificial Sequence: Synthetic peptide
IYDSSGYY

SEQ ID NO: 8051 - protein, 8 aa, Artificial Sequence
  Description of Artificial Sequence: Synthetic peptide
IYDSSGYF

SEQ ID NO: 8052 - protein, 8 aa, Artificial Sequence
  Description of Artificial Sequence: Synthetic peptide
NYDSSGYS

SEQ ID NO: 8053 - protein, 8 aa, Artificial Sequence
  Description of Artificial Sequence: Synthetic peptide
NYDSSGYF

SEQ ID NO: 8054 - protein, 8 aa, Artificial Sequence
  Description of Artificial Sequence: Synthetic peptide
VYDSSGYY

SEQ ID NO: 8055 - protein, 8 aa, Artificial Sequence
  Description of Artificial Sequence: Synthetic peptide
VYDSSGYF

SEQ ID NO: 8056 - protein, 8 aa, Artificial Sequence
  Description of Artificial Sequence: Synthetic peptide
FYDSSGYY

SEQ ID NO: 8057 - protein, 8 aa, Artificial Sequence
  Description of Artificial Sequence: Synthetic peptide
FYDSSGYS

SEQ ID NO: 8058 - protein, 8 aa, Artificial Sequence
  Description of Artificial Sequence: Synthetic peptide
SYDSSGYY

SEQ ID NO: 8059 - protein, 8 aa, Artificial Sequence
  Description of Artificial Sequence: Synthetic peptide
SYDSSGYS

SEQ ID NO: 8060 - protein, 8 aa, Artificial Sequence
  Description of Artificial Sequence: Synthetic peptide
PYDSSGYS

SEQ ID NO: 8061 - protein, 8 aa, Artificial Sequence
  Description of Artificial Sequence: Synthetic peptide
PYDSSGYY

SEQ ID NO: 8062 - protein, 8 aa, Artificial Sequence
  Description of Artificial Sequence: Synthetic peptide
LYDSSGYY

SEQ ID NO: 8063 - protein, 8 aa, Artificial Sequence
  Description of Artificial Sequence: Synthetic peptide
VYDSSGYS

SEQ ID NO: 8064 - protein, 8 aa, Artificial Sequence
  Description of Artificial Sequence: Synthetic peptide
SYDSSGYF

SEQ ID NO: 8065 - protein, 8 aa, Artificial Sequence
  Description of Artificial Sequence: Synthetic peptide
LYDSSGYF

SEQ ID NO: 8066 - protein, 8 aa, Artificial Sequence
  Description of Artificial Sequence: Synthetic peptide
HYDSSGYY

SEQ ID NO: 8067 - protein, 8 aa, Artificial Sequence
  Description of Artificial Sequence: Synthetic peptide
HYDSSGYS

SEQ ID NO: 8068 - protein, 8 aa, Artificial Sequence
  Description of Artificial Sequence: Synthetic peptide
TYDSSGYF

SEQ ID NO: 8069 - protein, 8 aa, Artificial Sequence
  Description of Artificial Sequence: Synthetic peptide
AYDSSGYF

SEQ ID NO: 8070 - protein, 8 aa, Artificial Sequence
  Description of Artificial Sequence: Synthetic peptide
DYDSSGYF

SEQ ID NO: 8071 - protein, 8 aa, Artificial Sequence
  Description of Artificial Sequence: Synthetic peptide
HYDSSGYF

SEQ ID NO: 8072 - protein, 8 aa, Artificial Sequence
  Description of Artificial Sequence: Synthetic peptide
RYYGSGSY

SEQ ID NO: 8073 - protein, 8 aa, Artificial Sequence
  Description of Artificial Sequence: Synthetic peptide
RYYGSGSS

SEQ ID NO: 8074 - protein, 8 aa, Artificial Sequence
  Description of Artificial Sequence: Synthetic peptide
GYYGSGSS

SEQ ID NO: 8075 - protein, 8 aa, Artificial Sequence
  Description of Artificial Sequence: Synthetic peptide
GYYGSGSY

SEQ ID NO: 8076 - protein, 8 aa, Artificial Sequence
  Description of Artificial Sequence: Synthetic peptide
FDFWSGYS

SEQ ID NO: 8077 - protein, 8 aa, Artificial Sequence
  Description of Artificial Sequence: Synthetic peptide
HDFWSGYF

SEQ ID NO: 8078 - protein, 8 aa, Artificial Sequence
  Description of Artificial Sequence: Synthetic peptide
FDFWSGYY

SEQ ID NO: 8079 - protein, 8 aa, Artificial Sequence
  Description of Artificial Sequence: Synthetic peptide
SDFWSGYS

SEQ ID NO: 8080 - protein, 8 aa, Artificial Sequence
  Description of Artificial Sequence: Synthetic peptide
SDFWSGYY

SEQ ID NO: 8081 - protein, 8 aa, Artificial Sequence
  Description of Artificial Sequence: Synthetic peptide
PDFWSGYS

SEQ ID NO: 8082 - protein, 8 aa, Artificial Sequence
  Description of Artificial Sequence: Synthetic peptide
HDFWSGYS

SEQ ID NO: 8083 - protein, 8 aa, Artificial Sequence
  Description of Artificial Sequence: Synthetic peptide
IDFWSGYY

SEQ ID NO: 8084 - protein, 8 aa, Artificial Sequence
  Description of Artificial Sequence: Synthetic peptide
HDFWSGYY

SEQ ID NO: 8085 - protein, 8 aa, Artificial Sequence
  Description of Artificial Sequence: Synthetic peptide
NDFWSGYF

SEQ ID NO: 8086 - protein, 8 aa, Artificial Sequence
  Description of Artificial Sequence: Synthetic peptide
YDFWSGYS

SEQ ID NO: 8087 - protein, 8 aa, Artificial Sequence
  Description of Artificial Sequence: Synthetic peptide
IDFWSGYS

SEQ ID NO: 8088 - protein, 8 aa, Artificial Sequence
  Description of Artificial Sequence: Synthetic peptide
PDFWSGYY

SEQ ID NO: 8089 - protein, 8 aa, Artificial Sequence
  Description of Artificial Sequence: Synthetic peptide
SDFWSGYF

SEQ ID NO: 8090 - protein, 8 aa, Artificial Sequence
  Description of Artificial Sequence: Synthetic peptide
VDFWSGYS

SEQ ID NO: 8091 - protein, 8 aa, Artificial Sequence
  Description of Artificial Sequence: Synthetic peptide
IDFWSGYF

SEQ ID NO: 8092 - protein, 8 aa, Artificial Sequence
  Description of Artificial Sequence: Synthetic peptide
YDFWSGYF

SEQ ID NO: 8093 - protein, 8 aa, Artificial Sequence
  Description of Artificial Sequence: Synthetic peptide
TDFWSGYY

SEQ ID NO: 8094 - protein, 8 aa, Artificial Sequence
  Description of Artificial Sequence: Synthetic peptide
DDFWSGYS

SEQ ID NO: 8095 - protein, 8 aa, Artificial Sequence
  Description of Artificial Sequence: Synthetic peptide
LDFWSGYS

SEQ ID NO: 8096 - protein, 8 aa, Artificial Sequence
  Description of Artificial Sequence: Synthetic peptide
DDFWSGYY

SEQ ID NO: 8097 - protein, 8 aa, Artificial Sequence
  Description of Artificial Sequence: Synthetic peptide
DDFWSGYF

SEQ ID NO: 8098 - protein, 8 aa, Artificial Sequence
  Description of Artificial Sequence: Synthetic peptide
VDFWSGYY

SEQ ID NO: 8099 - protein, 8 aa, Artificial Sequence
  Description of Artificial Sequence: Synthetic peptide
VDFWSGYF

SEQ ID NO: 8100 - protein, 8 aa, Artificial Sequence
  Description of Artificial Sequence: Synthetic peptide
NDFWSGYY

SEQ ID NO: 8101 - protein, 8 aa, Artificial Sequence
  Description of Artificial Sequence: Synthetic peptide
FDFWSGYF

SEQ ID NO: 8102 - protein, 8 aa, Artificial Sequence
  Description of Artificial Sequence: Synthetic peptide
NDFWSGYS

SEQ ID NO: 8103 - protein, 8 aa, Artificial Sequence
  Description of Artificial Sequence: Synthetic peptide
LDFWSGYY

SEQ ID NO: 8104 - protein, 8 aa, Artificial Sequence
  Description of Artificial Sequence: Synthetic peptide
ADFWSGYY

SEQ ID NO: 8105 - protein, 8 aa, Artificial Sequence
  Description of Artificial Sequence: Synthetic peptide
ADFWSGYS

SEQ ID NO: 8106 - protein, 8 aa, Artificial Sequence
  Description of Artificial Sequence: Synthetic peptide
TDFWSGYS

SEQ ID NO: 8107 - protein, 8 aa, Artificial Sequence
  Description of Artificial Sequence: Synthetic peptide
TDFWSGYF

SEQ ID NO: 8108 - protein, 8 aa, Artificial Sequence
  Description of Artificial Sequence: Synthetic peptide
ADFWSGYF

SEQ ID NO: 8109 - protein, 8 aa, Artificial Sequence
  Description of Artificial Sequence: Synthetic peptide
LDFWSGYF

SEQ ID NO: 8110 - protein, 8 aa, Artificial Sequence
  Description of Artificial Sequence: Synthetic peptide
PDFWSGYF

SEQ ID NO: 8111 - protein, 8 aa, Artificial Sequence
  Description of Artificial Sequence: Synthetic peptide
LLRYFDWY

SEQ ID NO: 8112 - protein, 8 aa, Artificial Sequence
  Description of Artificial Sequence: Synthetic peptide
QLRYFDWY

SEQ ID NO: 8113 - protein, 8 aa, Artificial Sequence
  Description of Artificial Sequence: Synthetic peptide
PLRYFDWL

SEQ ID NO: 8114 - protein, 8 aa, Artificial Sequence
  Description of Artificial Sequence: Synthetic peptide
ILRYFDWF

SEQ ID NO: 8115 - protein, 8 aa, Artificial Sequence
  Description of Artificial Sequence: Synthetic peptide
ILRYFDWY

SEQ ID NO: 8116 - protein, 8 aa, Artificial Sequence
  Description of Artificial Sequence: Synthetic peptide
ALRYFDWL

SEQ ID NO: 8117 - protein, 8 aa, Artificial Sequence
  Description of Artificial Sequence: Synthetic peptide
QLRYFDWF

SEQ ID NO: 8118 - protein, 8 aa, Artificial Sequence
  Description of Artificial Sequence: Synthetic peptide
KLRYFDWL

SEQ ID NO: 8119 - protein, 8 aa, Artificial Sequence
  Description of Artificial Sequence: Synthetic peptide
TLRYFDWL

SEQ ID NO: 8120 - protein, 8 aa, Artificial Sequence
  Description of Artificial Sequence: Synthetic peptide
TLRYFDWH

SEQ ID NO: 8121 - protein, 8 aa, Artificial Sequence
  Description of Artificial Sequence: Synthetic peptide
ELRYFDWL

SEQ ID NO: 8122 - protein, 8 aa, Artificial Sequence
  Description of Artificial Sequence: Synthetic peptide
ELRYFDWH

SEQ ID NO: 8123 - protein, 8 aa, Artificial Sequence
  Description of Artificial Sequence: Synthetic peptide
PLRYFDWH

SEQ ID NO: 8124 - protein, 8 aa, Artificial Sequence
  Description of Artificial Sequence: Synthetic peptide
ELRYFDWY

SEQ ID NO: 8125 - protein, 8 aa, Artificial Sequence
  Description of Artificial Sequence: Synthetic peptide
ELRYFDWF

SEQ ID NO: 8126 - protein, 8 aa, Artificial Sequence
  Description of Artificial Sequence: Synthetic peptide
LLRYFDWL

SEQ ID NO: 8127 - protein, 8 aa, Artificial Sequence
  Description of Artificial Sequence: Synthetic peptide
VLRYFDWF

SEQ ID NO: 8128 - protein, 8 aa, Artificial Sequence
  Description of Artificial Sequence: Synthetic peptide
TLRYFDWF

SEQ ID NO: 8129 - protein, 8 aa, Artificial Sequence
  Description of Artificial Sequence: Synthetic peptide
ALRYFDWF

SEQ ID NO: 8130 - protein, 8 aa, Artificial Sequence
  Description of Artificial Sequence: Synthetic peptide
ILRYFDWH

SEQ ID NO: 8131 - protein, 8 aa, Artificial Sequence
  Description of Artificial Sequence: Synthetic peptide
QLRYFDWL

SEQ ID NO: 8132 - protein, 8 aa, Artificial Sequence
  Description of Artificial Sequence: Synthetic peptide
QLRYFDWH

SEQ ID NO: 8133 - protein, 8 aa, Artificial Sequence
  Description of Artificial Sequence: Synthetic peptide
VLRYFDWY

SEQ ID NO: 8134 - protein, 8 aa, Artificial Sequence
  Description of Artificial Sequence: Synthetic peptide
TLRYFDWY

SEQ ID NO: 8135 - protein, 8 aa, Artificial Sequence
  Description of Artificial Sequence: Synthetic peptide
ILRYFDWL

SEQ ID NO: 8136 - protein, 8 aa, Artificial Sequence
  Description of Artificial Sequence: Synthetic peptide
LLRYFDWH

SEQ ID NO: 8137 - protein, 8 aa, Artificial Sequence
  Description of Artificial Sequence: Synthetic peptide
VLRYFDWH

SEQ ID NO: 8138 - protein, 8 aa, Artificial Sequence
  Description of Artificial Sequence: Synthetic peptide
KLRYFDWY

SEQ ID NO: 8139 - protein, 8 aa, Artificial Sequence
  Description of Artificial Sequence: Synthetic peptide
KLRYFDWF

SEQ ID NO: 8140 - protein, 8 aa, Artificial Sequence
  Description of Artificial Sequence: Synthetic peptide
ALRYFDWH

SEQ ID NO: 8141 - protein, 8 aa, Artificial Sequence
  Description of Artificial Sequence: Synthetic peptide
ALRYFDWY

SEQ ID NO: 8142 - protein, 8 aa, Artificial Sequence
  Description of Artificial Sequence: Synthetic peptide
KLRYFDWH

SEQ ID NO: 8143 - protein, 8 aa, Artificial Sequence
  Description of Artificial Sequence: Synthetic peptide
PLRYFDWY

SEQ ID NO: 8144 - protein, 8 aa, Artificial Sequence
  Description of Artificial Sequence: Synthetic peptide
PLRYFDWF

SEQ ID NO: 8145 - protein, 8 aa, Artificial Sequence
  Description of Artificial Sequence: Synthetic peptide
LLRYFDWF

SEQ ID NO: 8146 - protein, 9 aa, Artificial Sequence
  Description of Artificial Sequence: Synthetic peptide
IYYDSSGYS

SEQ ID NO: 8147 - protein, 9 aa, Artificial Sequence
  Description of Artificial Sequence: Synthetic peptide
TYYDSSGYS

SEQ ID NO: 8148 - protein, 9 aa, Artificial Sequence
  Description of Artificial Sequence: Synthetic peptide
HYYDSSGYY

SEQ ID NO: 8149 - protein, 9 aa, Artificial Sequence
  Description of Artificial Sequence: Synthetic peptide
TYYDSSGYY

SEQ ID NO: 8150 - protein, 9 aa, Artificial Sequence
  Description of Artificial Sequence: Synthetic peptide
HYYDSSGYS

SEQ ID NO: 8151 - protein, 9 aa, Artificial Sequence
  Description of Artificial Sequence: Synthetic peptide
NYYDSSGYF

SEQ ID NO: 8152 - protein, 9 aa, Artificial Sequence
  Description of Artificial Sequence: Synthetic peptide
AYYDSSGYS

SEQ ID NO: 8153 - protein, 9 aa, Artificial Sequence
  Description of Artificial Sequence: Synthetic peptide
DYYDSSGYF

SEQ ID NO: 8154 - protein, 9 aa, Artificial Sequence
  Description of Artificial Sequence: Synthetic peptide
DYYDSSGYS

SEQ ID NO: 8155 - protein, 9 aa, Artificial Sequence
  Description of Artificial Sequence: Synthetic peptide
LYYDSSGYS

SEQ ID NO: 8156 - protein, 9 aa, Artificial Sequence
  Description of Artificial Sequence: Synthetic peptide
NYYDSSGYS

SEQ ID NO: 8157 - protein, 9 aa, Artificial Sequence
  Description of Artificial Sequence: Synthetic peptide
HYYDSSGYF

SEQ ID NO: 8158 - protein, 9 aa, Artificial Sequence
  Description of Artificial Sequence: Synthetic peptide
DYYDSSGYY

SEQ ID NO: 8159 - protein, 9 aa, Artificial Sequence
  Description of Artificial Sequence: Synthetic peptide
LYYDSSGYY

SEQ ID NO: 8160 - protein, 9 aa, Artificial Sequence
  Description of Artificial Sequence: Synthetic peptide
IYYDSSGYY

SEQ ID NO: 8161 - protein, 9 aa, Artificial Sequence
  Description of Artificial Sequence: Synthetic peptide
LYYDSSGYF

SEQ ID NO: 8162 - protein, 9 aa, Artificial Sequence
  Description of Artificial Sequence: Synthetic peptide
IYYDSSGYF

SEQ ID NO: 8163 - protein, 9 aa, Artificial Sequence
  Description of Artificial Sequence: Synthetic peptide
AYYDSSGYF

SEQ ID NO: 8164 - protein, 9 aa, Artificial Sequence
  Description of Artificial Sequence: Synthetic peptide
AYYDSSGYY

SEQ ID NO: 8165 - protein, 9 aa, Artificial Sequence
  Description of Artificial Sequence: Synthetic peptide
FYYDSSGYS

SEQ ID NO: 8166 - protein, 9 aa, Artificial Sequence
  Description of Artificial Sequence: Synthetic peptide
YYYDSSGYS

SEQ ID NO: 8167 - protein, 9 aa, Artificial Sequence
  Description of Artificial Sequence: Synthetic peptide
FYYDSSGYY

SEQ ID NO: 8168 - protein, 9 aa, Artificial Sequence
  Description of Artificial Sequence: Synthetic peptide
FYYDSSGYF

SEQ ID NO: 8169 - protein, 9 aa, Artificial Sequence
  Description of Artificial Sequence: Synthetic peptide
YYYDSSGYF

SEQ ID NO: 8170 - protein, 9 aa, Artificial Sequence
  Description of Artificial Sequence: Synthetic peptide
VYYDSSGYF

SEQ ID NO: 8171 - protein, 9 aa, Artificial Sequence
  Description of Artificial Sequence: Synthetic peptide
PYYDSSGYY

SEQ ID NO: 8172 - protein, 9 aa, Artificial Sequence
  Description of Artificial Sequence: Synthetic peptide
PYYDSSGYS

SEQ ID NO: 8173 - protein, 9 aa, Artificial Sequence
  Description of Artificial Sequence: Synthetic peptide
VYYDSSGYS

SEQ ID NO: 8174 - protein, 9 aa, Artificial Sequence
  Description of Artificial Sequence: Synthetic peptide
SYYDSSGYY

SEQ ID NO: 8175 - protein, 9 aa, Artificial Sequence
  Description of Artificial Sequence: Synthetic peptide
NYYDSSGYY

SEQ ID NO: 8176 - protein, 9 aa, Artificial Sequence
  Description of Artificial Sequence: Synthetic peptide
VYYDSSGYY

SEQ ID NO: 8177 - protein, 9 aa, Artificial Sequence
  Description of Artificial Sequence: Synthetic peptide
SYYDSSGYS

SEQ ID NO: 8178 - protein, 9 aa, Artificial Sequence
  Description of Artificial Sequence: Synthetic peptide
SYYDSSGYF

SEQ ID NO: 8179 - protein, 9 aa, Artificial Sequence
  Description of Artificial Sequence: Synthetic peptide
TYYDSSGYF

SEQ ID NO: 8180 - protein, 9 aa, Artificial Sequence
  Description of Artificial Sequence: Synthetic peptide
PYYDSSGYF

SEQ ID NO: 8181 - protein, 9 aa, Artificial Sequence
  Description of Artificial Sequence: Synthetic peptide
PYCSGGSCF

SEQ ID NO: 8182 - protein, 9 aa, Artificial Sequence
  Description of Artificial Sequence: Synthetic peptide
TYCSGGSCF

SEQ ID NO: 8183 - protein, 9 aa, Artificial Sequence
  Description of Artificial Sequence: Synthetic peptide
IYCSGGSCF

SEQ ID NO: 8184 - protein, 9 aa, Artificial Sequence
  Description of Artificial Sequence: Synthetic peptide
VYCSGGSCS

SEQ ID NO: 8185 - protein, 9 aa, Artificial Sequence
  Description of Artificial Sequence: Synthetic peptide
TYCSGGSCY

SEQ ID NO: 8186 - protein, 9 aa, Artificial Sequence
  Description of Artificial Sequence: Synthetic peptide
VYCSGGSCF

SEQ ID NO: 8187 - protein, 9 aa, Artificial Sequence
  Description of Artificial Sequence: Synthetic peptide
TYCSGGSCS

SEQ ID NO: 8188 - protein, 9 aa, Artificial Sequence
  Description of Artificial Sequence: Synthetic peptide
GYCSGGSCS

SEQ ID NO: 8189 - protein, 9 aa, Artificial Sequence
  Description of Artificial Sequence: Synthetic peptide
IYCSGGSCS

SEQ ID NO: 8190 - protein, 9 aa, Artificial Sequence
  Description of Artificial Sequence: Synthetic peptide
IYCSGGSCY

SEQ ID NO: 8191 - protein, 9 aa, Artificial Sequence
  Description of Artificial Sequence: Synthetic peptide
VYCSGGSCY

SEQ ID NO: 8192 - protein, 9 aa, Artificial Sequence
  Description of Artificial Sequence: Synthetic peptide
AYCSGGSCF

SEQ ID NO: 8193 - protein, 9 aa, Artificial Sequence
  Description of Artificial Sequence: Synthetic peptide
GYCSGGSCF

SEQ ID NO: 8194 - protein, 9 aa, Artificial Sequence
  Description of Artificial Sequence: Synthetic peptide
LYCSGGSCF

SEQ ID NO: 8195 - protein, 9 aa, Artificial Sequence
  Description of Artificial Sequence: Synthetic peptide
RYCSGGSCF

SEQ ID NO: 8196 - protein, 9 aa, Artificial Sequence
  Description of Artificial Sequence: Synthetic peptide
LYCSGGSCS

SEQ ID NO: 8197 - protein, 9 aa, Artificial Sequence
  Description of Artificial Sequence: Synthetic peptide
RYCSGGSCY

SEQ ID NO: 8198 - protein, 9 aa, Artificial Sequence
  Description of Artificial Sequence: Synthetic peptide
AYCSGGSCS

SEQ ID NO: 8199 - protein, 9 aa, Artificial Sequence
  Description of Artificial Sequence: Synthetic peptide
SYCSGGSCY

SEQ ID NO: 8200 - protein, 9 aa, Artificial Sequence
  Description of Artificial Sequence: Synthetic peptide
SYCSGGSCF

SEQ ID NO: 8201 - protein, 9 aa, Artificial Sequence
  Description of Artificial Sequence: Synthetic peptide
AYCSGGSCY

SEQ ID NO: 8202 - protein, 9 aa, Artificial Sequence
  Description of Artificial Sequence: Synthetic peptide
SYCSGGSCS

SEQ ID NO: 8203 - protein, 9 aa, Artificial Sequence
  Description of Artificial Sequence: Synthetic peptide
PYCSGGSCS

SEQ ID NO: 8204 - protein, 9 aa, Artificial Sequence
  Description of Artificial Sequence: Synthetic peptide
LYCSGGSCY

SEQ ID NO: 8205 - protein, 9 aa, Artificial Sequence
  Description of Artificial Sequence: Synthetic peptide
RYCSGGSCS

SEQ ID NO: 8206 - protein, 9 aa, Artificial Sequence
  Description of Artificial Sequence: Synthetic peptide
PYCSGGSCY

SEQ ID NO: 8207 - protein, 9 aa, Artificial Sequence
  Description of Artificial Sequence: Synthetic peptide
TYCSSTSCY

SEQ ID NO: 8208 - protein, 9 aa, Artificial Sequence
  Description of Artificial Sequence: Synthetic peptide
AYCSSTSCY

SEQ ID NO: 8209 - protein, 9 aa, Artificial Sequence
  Description of Artificial Sequence: Synthetic peptide
AYCSSTSCS

SEQ ID NO: 8210 - protein, 9 aa, Artificial Sequence
  Description of Artificial Sequence: Synthetic peptide
RYCSSTSCS

SEQ ID NO: 8211 - protein, 9 aa, Artificial Sequence
  Description of Artificial Sequence: Synthetic peptide
TYCSSTSCS

SEQ ID NO: 8212 - protein, 9 aa, Artificial Sequence
  Description of Artificial Sequence: Synthetic peptide
PYCSSTSCY

SEQ ID NO: 8213 - protein, 9 aa, Artificial Sequence
  Description of Artificial Sequence: Synthetic peptide
PYCSSTSCS

SEQ ID NO: 8214 - protein, 9 aa, Artificial Sequence
  Description of Artificial Sequence: Synthetic peptide
RYCSSTSCY

SEQ ID NO: 8215 - protein, 9 aa, Artificial Sequence
  Description of Artificial Sequence: Synthetic peptide
VYCSSTSCS

SEQ ID NO: 8216 - protein, 9 aa, Artificial Sequence
  Description of Artificial Sequence: Synthetic peptide
VYCSSTSCY

SEQ ID NO: 8217 - protein, 9 aa, Artificial Sequence
  Description of Artificial Sequence: Synthetic peptide
LYCSSTSCF

SEQ ID NO: 8218 - protein, 9 aa, Artificial Sequence
  Description of Artificial Sequence: Synthetic peptide
LYCSSTSCY

SEQ ID NO: 8219 - protein, 9 aa, Artificial Sequence
  Description of Artificial Sequence: Synthetic peptide
PYCSSTSCF

SEQ ID NO: 8220 - protein, 9 aa, Artificial Sequence
  Description of Artificial Sequence: Synthetic peptide
VYCSSTSCF

SEQ ID NO: 8221 - protein, 9 aa, Artificial Sequence
  Description of Artificial Sequence: Synthetic peptide
IYCSSTSCY

SEQ ID NO: 8222 - protein, 9 aa, Artificial Sequence
  Description of Artificial Sequence: Synthetic peptide
IYCSSTSCS

SEQ ID NO: 8223 - protein, 9 aa, Artificial Sequence
  Description of Artificial Sequence: Synthetic peptide
IYCSSTSCF

SEQ ID NO: 8224 - protein, 9 aa, Artificial Sequence
  Description of Artificial Sequence: Synthetic peptide
SYCSSTSCS

SEQ ID NO: 8225 - protein, 9 aa, Artificial Sequence
  Description of Artificial Sequence: Synthetic peptide
LYCSSTSCS

SEQ ID NO: 8226 - protein, 9 aa, Artificial Sequence
  Description of Artificial Sequence: Synthetic peptide
SYCSSTSCY

SEQ ID NO: 8227 - protein, 9 aa, Artificial Sequence
  Description of Artificial Sequence: Synthetic peptide
SYCSSTSCF

SEQ ID NO: 8228 - protein, 9 aa, Artificial Sequence
  Description of Artificial Sequence: Synthetic peptide
GYCSSTSCF

SEQ ID NO: 8229 - protein, 9 aa, Artificial Sequence
  Description of Artificial Sequence: Synthetic peptide
GYCSSTSCS

SEQ ID NO: 8230 - protein, 9 aa, Artificial Sequence
  Description of Artificial Sequence: Synthetic peptide
RYCSSTSCF

SEQ ID NO: 8231 - protein, 9 aa, Artificial Sequence
  Description of Artificial Sequence: Synthetic peptide
TYCSSTSCF

SEQ ID NO: 8232 - protein, 9 aa, Artificial Sequence
  Description of Artificial Sequence: Synthetic peptide
AYCSSTSCF

SEQ ID NO: 8233 - protein, 9 aa, Artificial Sequence
  Description of Artificial Sequence: Synthetic peptide
IYDFWSGYY

SEQ ID NO: 8234 - protein, 9 aa, Artificial Sequence
  Description of Artificial Sequence: Synthetic peptide
NYDFWSGYY

SEQ ID NO: 8235 - protein, 9 aa, Artificial Sequence
  Description of Artificial Sequence: Synthetic peptide
PYDFWSGYF

SEQ ID NO: 8236 - protein, 9 aa, Artificial Sequence
  Description of Artificial Sequence: Synthetic peptide
SYDFWSGYF

SEQ ID NO: 8237 - protein, 9 aa, Artificial Sequence
  Description of Artificial Sequence: Synthetic peptide
VYDFWSGYF

SEQ ID NO: 8238 - protein, 9 aa, Artificial Sequence
  Description of Artificial Sequence: Synthetic peptide
VYDFWSGYY

SEQ ID NO: 8239 - protein, 9 aa, Artificial Sequence
  Description of Artificial Sequence: Synthetic peptide
HYDFWSGYY

SEQ ID NO: 8240 - protein, 9 aa, Artificial Sequence
  Description of Artificial Sequence: Synthetic peptide
HYDFWSGYF

SEQ ID NO: 8241 - protein, 9 aa, Artificial Sequence
  Description of Artificial Sequence: Synthetic peptide
HYDFWSGYS

SEQ ID NO: 8242 - protein, 9 aa, Artificial Sequence
  Description of Artificial Sequence: Synthetic peptide
IYDFWSGYS

SEQ ID NO: 8243 - protein, 9 aa, Artificial Sequence
  Description of Artificial Sequence: Synthetic peptide
NYDFWSGYS

SEQ ID NO: 8244 - protein, 9 aa, Artificial Sequence
  Description of Artificial Sequence: Synthetic peptide
AYDFWSGYS

SEQ ID NO: 8245 - protein, 9 aa, Artificial Sequence
  Description of Artificial Sequence: Synthetic peptide
SYDFWSGYS

SEQ ID NO: 8246 - protein, 9 aa, Artificial Sequence
  Description of Artificial Sequence: Synthetic peptide
PYDFWSGYS

SEQ ID NO: 8247 - protein, 9 aa, Artificial Sequence
  Description of Artificial Sequence: Synthetic peptide
AYDFWSGYY

SEQ ID NO: 8248 - protein, 9 aa, Artificial Sequence
  Description of Artificial Sequence: Synthetic peptide
SYDFWSGYY

SEQ ID NO: 8249 - protein, 9 aa, Artificial Sequence
  Description of Artificial Sequence: Synthetic peptide
PYDFWSGYY

SEQ ID NO: 8250 - protein, 9 aa, Artificial Sequence
  Description of Artificial Sequence: Synthetic peptide
FYDFWSGYY

SEQ ID NO: 8251 - protein, 9 aa, Artificial Sequence
  Description of Artificial Sequence: Synthetic peptide
FYDFWSGYF

SEQ ID NO: 8252 - protein, 9 aa, Artificial Sequence
  Description of Artificial Sequence: Synthetic peptide
DYDFWSGYS

SEQ ID NO: 8253 - protein, 9 aa, Artificial Sequence
  Description of Artificial Sequence: Synthetic peptide
FYDFWSGYS

SEQ ID NO: 8254 - protein, 9 aa, Artificial Sequence
  Description of Artificial Sequence: Synthetic peptide
DYDFWSGYF

SEQ ID NO: 8255 - protein, 9 aa, Artificial Sequence
  Description of Artificial Sequence: Synthetic peptide
LYDFWSGYY

SEQ ID NO: 8256 - protein, 9 aa, Artificial Sequence
  Description of Artificial Sequence: Synthetic peptide
AYDFWSGYF

SEQ ID NO: 8257 - protein, 9 aa, Artificial Sequence
  Description of Artificial Sequence: Synthetic peptide
LYDFWSGYS

SEQ ID NO: 8258 - protein, 9 aa, Artificial Sequence
  Description of Artificial Sequence: Synthetic peptide
DYDFWSGYY

SEQ ID NO: 8259 - protein, 9 aa, Artificial Sequence
  Description of Artificial Sequence: Synthetic peptide
LYDFWSGYF

SEQ ID NO: 8260 - protein, 9 aa, Artificial Sequence
  Description of Artificial Sequence: Synthetic peptide
TYDFWSGYY

SEQ ID NO: 8261 - protein, 9 aa, Artificial Sequence
  Description of Artificial Sequence: Synthetic peptide
TYDFWSGYF

SEQ ID NO: 8262 - protein, 9 aa, Artificial Sequence
  Description of Artificial Sequence: Synthetic peptide
YYDFWSGYS

SEQ ID NO: 8263 - protein, 9 aa, Artificial Sequence
  Description of Artificial Sequence: Synthetic peptide
YYDFWSGYF

SEQ ID NO: 8264 - protein, 9 aa, Artificial Sequence
  Description of Artificial Sequence: Synthetic peptide
TYDFWSGYS

SEQ ID NO: 8265 - protein, 9 aa, Artificial Sequence
  Description of Artificial Sequence: Synthetic peptide
VYDFWSGYS

SEQ ID NO: 8266 - protein, 9 aa, Artificial Sequence
  Description of Artificial Sequence: Synthetic peptide
NYDFWSGYF

SEQ ID NO: 8267 - protein, 9 aa, Artificial Sequence
  Description of Artificial Sequence: Synthetic peptide
IYDFWSGYF

SEQ ID NO: 8268 - protein, 9 aa, Artificial Sequence
  Description of Artificial Sequence: Synthetic peptide
FCSGGSCYS

SEQ ID NO: 8269 - protein, 9 aa, Artificial Sequence
  Description of Artificial Sequence: Synthetic peptide
LCSGGSCYS

SEQ ID NO: 8270 - protein, 9 aa, Artificial Sequence
  Description of Artificial Sequence: Synthetic peptide
VCSGGSCYS

SEQ ID NO: 8271 - protein, 9 aa, Artificial Sequence
  Description of Artificial Sequence: Synthetic peptide
ACSGGSCYS

SEQ ID NO: 8272 - protein, 9 aa, Artificial Sequence
  Description of Artificial Sequence: Synthetic peptide
ACSGGSCYY

SEQ ID NO: 8273 - protein, 9 aa, Artificial Sequence
  Description of Artificial Sequence: Synthetic peptide
FCSGGSCYY

SEQ ID NO: 8274 - protein, 9 aa, Artificial Sequence
  Description of Artificial Sequence: Synthetic peptide
LCSGGSCYF

SEQ ID NO: 8275 - protein, 9 aa, Artificial Sequence
  Description of Artificial Sequence: Synthetic peptide
LCSGGSCYY

SEQ ID NO: 8276 - protein, 9 aa, Artificial Sequence
  Description of Artificial Sequence: Synthetic peptide
VCSGGSCYY

SEQ ID NO: 8277 - protein, 9 aa, Artificial Sequence
  Description of Artificial Sequence: Synthetic peptide
PCSGGSCYS

SEQ ID NO: 8278 - protein, 9 aa, Artificial Sequence
  Description of Artificial Sequence: Synthetic peptide
PCSGGSCYY

SEQ ID NO: 8279 - protein, 9 aa, Artificial Sequence
  Description of Artificial Sequence: Synthetic peptide
PCSGGSCYF

SEQ ID NO: 8280 - protein, 9 aa, Artificial Sequence
  Description of Artificial Sequence: Synthetic peptide
YCSGGSCYF

SEQ ID NO: 8281 - protein, 9 aa, Artificial Sequence
  Description of Artificial Sequence: Synthetic peptide
YCSGGSCYY

SEQ ID NO: 8282 - protein, 9 aa, Artificial Sequence
  Description of Artificial Sequence: Synthetic peptide
SCSGGSCYY

SEQ ID NO: 8283 - protein, 9 aa, Artificial Sequence
  Description of Artificial Sequence: Synthetic peptide
HCSGGSCYF

SEQ ID NO: 8284 - protein, 9 aa, Artificial Sequence
  Description of Artificial Sequence: Synthetic peptide
DCSGGSCYY

SEQ ID NO: 8285 - protein, 9 aa, Artificial Sequence
  Description of Artificial Sequence: Synthetic peptide
SCSGGSCYF

SEQ ID NO: 8286 - protein, 9 aa, Artificial Sequence
  Description of Artificial Sequence: Synthetic peptide
DCSGGSCYS

SEQ ID NO: 8287 - protein, 9 aa, Artificial Sequence
  Description of Artificial Sequence: Synthetic peptide
HCSGGSCYS

SEQ ID NO: 8288 - protein, 9 aa, Artificial Sequence
  Description of Artificial Sequence: Synthetic peptide
SCSGGSCYS

SEQ ID NO: 8289 - protein, 9 aa, Artificial Sequence
  Description of Artificial Sequence: Synthetic peptide
FCSGGSCYF

SEQ ID NO: 8290 - protein, 9 aa, Artificial Sequence
  Description of Artificial Sequence: Synthetic peptide
ACSGGSCYF

SEQ ID NO: 8291 - protein, 9 aa, Artificial Sequence
  Description of Artificial Sequence: Synthetic peptide
DCSGGSCYF

SEQ ID NO: 8292 - protein, 9 aa, Artificial Sequence
  Description of Artificial Sequence: Synthetic peptide
HCSGGSCYY

SEQ ID NO: 8293 - protein, 9 aa, Artificial Sequence
  Description of Artificial Sequence: Synthetic peptide
VCSGGSCYF

SEQ ID NO: 8294 - protein, 10 aa, Artificial Sequence
  Description of Artificial Sequence: Synthetic peptide
FYYDSSGYYY

SEQ ID NO: 8295 - protein, 10 aa, Artificial Sequence
  Description of Artificial Sequence: Synthetic peptide
YYYDSSGYYF

SEQ ID NO: 8296 - protein, 10 aa, Artificial Sequence
  Description of Artificial Sequence: Synthetic peptide
PYYDSSGYYY

SEQ ID NO: 8297 - protein, 10 aa, Artificial Sequence
  Description of Artificial Sequence: Synthetic peptide
VYYDSSGYYS

SEQ ID NO: 8298 - protein, 10 aa, Artificial Sequence
  Description of Artificial Sequence: Synthetic peptide
PYYDSSGYYS

SEQ ID NO: 8299 - protein, 10 aa, Artificial Sequence
  Description of Artificial Sequence: Synthetic peptide
FYYDSSGYYS

SEQ ID NO: 8300 - protein, 10 aa, Artificial Sequence
  Description of Artificial Sequence: Synthetic peptide
NYYDSSGYYY

SEQ ID NO: 8301 - protein, 10 aa, Artificial Sequence
  Description of Artificial Sequence: Synthetic peptide
NYYDSSGYYS

SEQ ID NO: 8302 - protein, 10 aa, Artificial Sequence
  Description of Artificial Sequence: Synthetic peptide
DYYDSSGYYS

SEQ ID NO: 8303 - protein, 10 aa, Artificial Sequence
  Description of Artificial Sequence: Synthetic peptide
HYYDSSGYYF

SEQ ID NO: 8304 - protein, 10 aa, Artificial Sequence
  Description of Artificial Sequence: Synthetic peptide
DYYDSSGYYY

SEQ ID NO: 8305 - protein, 10 aa, Artificial Sequence
  Description of Artificial Sequence: Synthetic peptide
NYYDSSGYYF

SEQ ID NO: 8306 - protein, 10 aa, Artificial Sequence
  Description of Artificial Sequence: Synthetic peptide
HYYDSSGYYY

SEQ ID NO: 8307 - protein, 10 aa, Artificial Sequence
  Description of Artificial Sequence: Synthetic peptide
LYYDSSGYYF

SEQ ID NO: 8308 - protein, 10 aa, Artificial Sequence
  Description of Artificial Sequence: Synthetic peptide
IYYDSSGYYS

SEQ ID NO: 8309 - protein, 10 aa, Artificial Sequence
  Description of Artificial Sequence: Synthetic peptide
YYYDSSGYYS

SEQ ID NO: 8310 - protein, 10 aa, Artificial Sequence
  Description of Artificial Sequence: Synthetic peptide
IYYDSSGYYF

SEQ ID NO: 8311 - protein, 10 aa, Artificial Sequence
  Description of Artificial Sequence: Synthetic peptide
HYYDSSGYYS

SEQ ID NO: 8312 - protein, 10 aa, Artificial Sequence
  Description of Artificial Sequence: Synthetic peptide
TYYDSSGYYS

SEQ ID NO: 8313 - protein, 10 aa, Artificial Sequence
  Description of Artificial Sequence: Synthetic peptide
IYYDSSGYYY

SEQ ID NO: 8314 - protein, 10 aa, Artificial Sequence
  Description of Artificial Sequence: Synthetic peptide
TYYDSSGYYF

SEQ ID NO: 8315 - protein, 10 aa, Artificial Sequence
  Description of Artificial Sequence: Synthetic peptide
LYYDSSGYYS

SEQ ID NO: 8316 - protein, 10 aa, Artificial Sequence
  Description of Artificial Sequence: Synthetic peptide
TYYDSSGYYY

SEQ ID NO: 8317 - protein, 10 aa, Artificial Sequence
  Description of Artificial Sequence: Synthetic peptide
LYYDSSGYYY

SEQ ID NO: 8318 - protein, 10 aa, Artificial Sequence
  Description of Artificial Sequence: Synthetic peptide
AYYDSSGYYF

SEQ ID NO: 8319 - protein, 10 aa, Artificial Sequence
  Description of Artificial Sequence: Synthetic peptide
FYYDSSGYYF

SEQ ID NO: 8320 - protein, 10 aa, Artificial Sequence
  Description of Artificial Sequence: Synthetic peptide
AYYDSSGYYY

SEQ ID NO: 8321 - protein, 10 aa, Artificial Sequence
  Description of Artificial Sequence: Synthetic peptide
VYYDSSGYYY

SEQ ID NO: 8322 - protein, 10 aa, Artificial Sequence
  Description of Artificial Sequence: Synthetic peptide
SYYDSSGYYF

SEQ ID NO: 8323 - protein, 10 aa, Artificial Sequence
  Description of Artificial Sequence: Synthetic peptide
PYYDSSGYYF

SEQ ID NO: 8324 - protein, 10 aa, Artificial Sequence
  Description of Artificial Sequence: Synthetic peptide
SYYDSSGYYY

SEQ ID NO: 8325 - protein, 10 aa, Artificial Sequence
  Description of Artificial Sequence: Synthetic peptide
AYYDSSGYYS

SEQ ID NO: 8326 - protein, 10 aa, Artificial Sequence
  Description of Artificial Sequence: Synthetic peptide
DYYDSSGYYF

SEQ ID NO: 8327 - protein, 10 aa, Artificial Sequence
  Description of Artificial Sequence: Synthetic peptide
SYYDSSGYYS

SEQ ID NO: 8328 - protein, 10 aa, Artificial Sequence
  Description of Artificial Sequence: Synthetic peptide
VYYDSSGYYF

SEQ ID NO: 8329 - protein, 11 aa, Artificial Sequence
  Description of Artificial Sequence: Synthetic peptide
IYDYVWGSYAS

SEQ ID NO: 8330 - protein, 11 aa, Artificial Sequence
  Description of Artificial Sequence: Synthetic peptide
AYDYVWGSYAS

SEQ ID NO: 8331 - protein, 11 aa, Artificial Sequence
  Description of Artificial Sequence: Synthetic peptide
IYDYVWGSYAY

SEQ ID NO: 8332 - protein, 11 aa, Artificial Sequence
  Description of Artificial Sequence: Synthetic peptide
NYDYVWGSYAY

SEQ ID NO: 8333 - protein, 11 aa, Artificial Sequence
  Description of Artificial Sequence: Synthetic peptide
NYDYVWGSYAS

SEQ ID NO: 8334 - protein, 11 aa, Artificial Sequence
  Description of Artificial Sequence: Synthetic peptide
YYDYVWGSYAF

SEQ ID NO: 8335 - protein, 11 aa, Artificial Sequence
  Description of Artificial Sequence: Synthetic peptide
DYDYVWGSYAF

SEQ ID NO: 8336 - protein, 11 aa, Artificial Sequence
  Description of Artificial Sequence: Synthetic peptide
SYDYVWGSYAY

SEQ ID NO: 8337 - protein, 11 aa, Artificial Sequence
  Description of Artificial Sequence: Synthetic peptide
DYDYVWGSYAS

SEQ ID NO: 8338 - protein, 11 aa, Artificial Sequence
  Description of Artificial Sequence: Synthetic peptide
DYDYVWGSYAY

SEQ ID NO: 8339 - protein, 11 aa, Artificial Sequence
  Description of Artificial Sequence: Synthetic peptide
FYDYVWGSYAS

SEQ ID NO: 8340 - protein, 11 aa, Artificial Sequence
  Description of Artificial Sequence: Synthetic peptide
NYDYVWGSYAF

SEQ ID NO: 8341 - protein, 11 aa, Artificial Sequence
  Description of Artificial Sequence: Synthetic peptide
YYDYVWGSYAS

SEQ ID NO: 8342 - protein, 11 aa, Artificial Sequence
  Description of Artificial Sequence: Synthetic peptide
FYDYVWGSYAY

SEQ ID NO: 8343 - protein, 11 aa, Artificial Sequence
  Description of Artificial Sequence: Synthetic peptide
SYDYVWGSYAS

SEQ ID NO: 8344 - protein, 11 aa, Artificial Sequence
  Description of Artificial Sequence: Synthetic peptide
PYDYVWGSYAF

SEQ ID NO: 8345 - protein, 11 aa, Artificial Sequence
  Description of Artificial Sequence: Synthetic peptide
TYDYVWGSYAY

SEQ ID NO: 8346 - protein, 11 aa, Artificial Sequence
  Description of Artificial Sequence: Synthetic peptide
VYDYVWGSYAY

SEQ ID NO: 8347 - protein, 11 aa, Artificial Sequence
  Description of Artificial Sequence: Synthetic peptide
SYDYVWGSYAF

SEQ ID NO: 8348 - protein, 11 aa, Artificial Sequence
  Description of Artificial Sequence: Synthetic peptide
FYDYVWGSYAF

SEQ ID NO: 8349 - protein, 11 aa, Artificial Sequence
  Description of Artificial Sequence: Synthetic peptide
HYDYVWGSYAS

SEQ ID NO: 8350 - protein, 11 aa, Artificial Sequence
  Description of Artificial Sequence: Synthetic peptide
VYDYVWGSYAS

SEQ ID NO: 8351 - protein, 11 aa, Artificial Sequence
  Description of Artificial Sequence: Synthetic peptide
VYDYVWGSYAF

SEQ ID NO: 8352 - protein, 11 aa, Artificial Sequence
  Description of Artificial Sequence: Synthetic peptide
AYDYVWGSYAY

SEQ ID NO: 8353 - protein, 11 aa, Artificial Sequence
  Description of Artificial Sequence: Synthetic peptide
LYDYVWGSYAS

SEQ ID NO: 8354 - protein, 11 aa, Artificial Sequence
  Description of Artificial Sequence: Synthetic peptide
TYDYVWGSYAF

SEQ ID NO: 8355 - protein, 11 aa, Artificial Sequence
  Description of Artificial Sequence: Synthetic peptide
AYDYVWGSYAF

SEQ ID NO: 8356 - protein, 11 aa, Artificial Sequence
  Description of Artificial Sequence: Synthetic peptide
HYDYVWGSYAY

SEQ ID NO: 8357 - protein, 11 aa, Artificial Sequence
  Description of Artificial Sequence: Synthetic peptide
TYDYVWGSYAS

SEQ ID NO: 8358 - protein, 11 aa, Artificial Sequence
  Description of Artificial Sequence: Synthetic peptide
LYDYVWGSYAF

SEQ ID NO: 8359 - protein, 11 aa, Artificial Sequence
  Description of Artificial Sequence: Synthetic peptide
PYDYVWGSYAY

SEQ ID NO: 8360 - protein, 11 aa, Artificial Sequence
  Description of Artificial Sequence: Synthetic peptide
PYDYVWGSYAS

SEQ ID NO: 8361 - protein, 11 aa, Artificial Sequence
  Description of Artificial Sequence: Synthetic peptide
HYDYVWGSYAF

SEQ ID NO: 8362 - protein, 11 aa, Artificial Sequence
  Description of Artificial Sequence: Synthetic peptide
LYDYVWGSYAY

SEQ ID NO: 8363 - protein, 11 aa, Artificial Sequence
  Description of Artificial Sequence: Synthetic peptide
IYDYVWGSYAF

SEQ ID NO: 8364 - protein, 12 aa, Artificial Sequence
  Description of Artificial Sequence: Synthetic peptide
NYDYVWGSYAYT

SEQ ID NO: 8365 - protein, 12 aa, Artificial Sequence
  Description of Artificial Sequence: Synthetic peptide
NYDYVWGSYAYI

SEQ ID NO: 8366 - protein, 12 aa, Artificial Sequence
  Description of Artificial Sequence: Synthetic peptide
IYDYVWGSYAYI

SEQ ID NO: 8367 - protein, 12 aa, Artificial Sequence
  Description of Artificial Sequence: Synthetic peptide
YYDYVWGSYAYK

SEQ ID NO: 8368 - protein, 12 aa, Artificial Sequence
  Description of Artificial Sequence: Synthetic peptide
NYDYVWGSYAYK

SEQ ID NO: 8369 - protein, 12 aa, Artificial Sequence
  Description of Artificial Sequence: Synthetic peptide
PYDYVWGSYAYT

SEQ ID NO: 8370 - protein, 12 aa, Artificial Sequence
  Description of Artificial Sequence: Synthetic peptide
DYDYVWGSYAYI

SEQ ID NO: 8371 - protein, 12 aa, Artificial Sequence
  Description of Artificial Sequence: Synthetic peptide
PYDYVWGSYAYK

SEQ ID NO: 8372 - protein, 12 aa, Artificial Sequence
  Description of Artificial Sequence: Synthetic peptide
FYDYVWGSYAYI

SEQ ID NO: 8373 - protein, 12 aa, Artificial Sequence
  Description of Artificial Sequence: Synthetic peptide
VYDYVWGSYAYT

SEQ ID NO: 8374 - protein, 12 aa, Artificial Sequence
  Description of Artificial Sequence: Synthetic peptide
DYDYVWGSYAYK

SEQ ID NO: 8375 - protein, 12 aa, Artificial Sequence
  Description of Artificial Sequence: Synthetic peptide
IYDYVWGSYAYT

SEQ ID NO: 8376 - protein, 12 aa, Artificial Sequence
  Description of Artificial Sequence: Synthetic peptide
IYDYVWGSYAYK

SEQ ID NO: 8377 - protein, 12 aa, Artificial Sequence
  Description of Artificial Sequence: Synthetic peptide
LYDYVWGSYAYI

SEQ ID NO: 8378 - protein, 12 aa, Artificial Sequence
  Description of Artificial Sequence: Synthetic peptide
HYDYVWGSYAYK

SEQ ID NO: 8379 - protein, 12 aa, Artificial Sequence
  Description of Artificial Sequence: Synthetic peptide
TYDYVWGSYAYI

SEQ ID NO: 8380 - protein, 12 aa, Artificial Sequence
  Description of Artificial Sequence: Synthetic peptide
HYDYVWGSYAYT

SEQ ID NO: 8381 - protein, 12 aa, Artificial Sequence
  Description of Artificial Sequence: Synthetic peptide
AYDYVWGSYAYT

SEQ ID NO: 8382 - protein, 12 aa, Artificial Sequence
  Description of Artificial Sequence: Synthetic peptide
AYDYVWGSYAYK

SEQ ID NO: 8383 - protein, 12 aa, Artificial Sequence
  Description of Artificial Sequence: Synthetic peptide
AYDYVWGSYAYI

SEQ ID NO: 8384 - protein, 12 aa, Artificial Sequence
  Description of Artificial Sequence: Synthetic peptide
TYDYVWGSYAYK

SEQ ID NO: 8385 - protein, 12 aa, Artificial Sequence
  Description of Artificial Sequence: Synthetic peptide
DYDYVWGSYAYT

SEQ ID NO: 8386 - protein, 12 aa, Artificial Sequence
  Description of Artificial Sequence: Synthetic peptide
VYDYVWGSYAYK

SEQ ID NO: 8387 - protein, 12 aa, Artificial Sequence
  Description of Artificial Sequence: Synthetic peptide
TYDYVWGSYAYT

SEQ ID NO: 8388 - protein, 12 aa, Artificial Sequence
  Description of Artificial Sequence: Synthetic peptide
FYDYVWGSYAYK

SEQ ID NO: 8389 - protein, 12 aa, Artificial Sequence
  Description of Artificial Sequence: Synthetic peptide
LYDYVWGSYAYK

SEQ ID NO: 8390 - protein, 12 aa, Artificial Sequence
  Description of Artificial Sequence: Synthetic peptide
VYDYVWGSYAYI

SEQ ID NO: 8391 - protein, 12 aa, Artificial Sequence
  Description of Artificial Sequence: Synthetic peptide
LYDYVWGSYAYT

SEQ ID NO: 8392 - protein, 12 aa, Artificial Sequence
  Description of Artificial Sequence: Synthetic peptide
PYDYVWGSYAYI

SEQ ID NO: 8393 - protein, 12 aa, Artificial Sequence
  Description of Artificial Sequence: Synthetic peptide
FYDYVWGSYAYT

SEQ ID NO: 8394 - protein, 12 aa, Artificial Sequence
  Description of Artificial Sequence: Synthetic peptide
YYDYVWGSYAYI

SEQ ID NO: 8395 - protein, 12 aa, Artificial Sequence
  Description of Artificial Sequence: Synthetic peptide
SYDYVWGSYAYI

SEQ ID NO: 8396 - protein, 12 aa, Artificial Sequence
  Description of Artificial Sequence: Synthetic peptide
HYDYVWGSYAYI

SEQ ID NO: 8397 - protein, 12 aa, Artificial Sequence
  Description of Artificial Sequence: Synthetic peptide
SYDYVWGSYAYT

SEQ ID NO: 8398 - protein, 12 aa, Artificial Sequence
  Description of Artificial Sequence: Synthetic peptide
SYDYVWGSYAYK

SEQ ID NO: 8399 - DNA, 12 bp, Artificial Sequence
  Description of Artificial Sequence: Synthetic oligonucleotide
ggabhcggatac

SEQ ID NO: 8400 - DNA, 12 bp, Artificial Sequence
  Description of Artificial Sequence: Synthetic oligonucleotide
agabhcggatac

SEQ ID NO: 8401 - DNA, 12 bp, Artificial Sequence
  Description of Artificial Sequence: Synthetic oligonucleotide
agcbhcggatac

SEQ ID NO: 8402 - DNA, 12 bp, Artificial Sequence
  Description of Artificial Sequence: Synthetic oligonucleotide
ccabhcggatac

SEQ ID NO: 8403 - DNA, 12 bp, Artificial Sequence
  Description of Artificial Sequence: Synthetic oligonucleotide
ggtagavhgtac

SEQ ID NO: 8404 - DNA, 12 bp, Artificial Sequence
  Description of Artificial Sequence: Synthetic oligonucleotide
aggagavhgtac

SEQ ID NO: 8405 - DNA, 12 bp, Artificial Sequence
  Description of Artificial Sequence: Synthetic oligonucleotide
ggabhcggatgg

SEQ ID NO: 8406 - DNA, 12 bp, Artificial Sequence
  Description of Artificial Sequence: Synthetic oligonucleotide
ggabhcggacta

SEQ ID NO: 8407 - DNA, 12 bp, Artificial Sequence
  Description of Artificial Sequence: Synthetic oligonucleotide
ggabhcacagct

SEQ ID NO: 8408 - DNA, 12 bp, Artificial Sequence
  Description of Artificial Sequence: Synthetic oligonucleotide
ggabhcacacaa

SEQ ID NO: 8409 - protein, 4 aa, Artificial Sequence
  Description of Artificial Sequence: Synthetic peptide
RPGY

SEQ ID NO: 8410 - protein, 4 aa, Artificial Sequence
  Description of Artificial Sequence: Synthetic peptide
RFGY

SEQ ID NO: 8411 - protein, 4 aa, Artificial Sequence
  Description of Artificial Sequence: Synthetic peptide
RLGY

SEQ ID NO: 8412 - protein, 4 aa, Artificial Sequence
  Description of Artificial Sequence: Synthetic peptide
GREY

SEQ ID NO: 8413 - protein, 4 aa, Artificial Sequence
  Description of Artificial Sequence: Synthetic peptide
GRKY

SEQ ID NO: 8414 - protein, 4 aa, Artificial Sequence
  Description of Artificial Sequence: Synthetic peptide
GHGW

SEQ ID NO: 8415 - protein, 4 aa, Artificial Sequence
  Description of Artificial Sequence: Synthetic peptide
RVGY

SEQ ID NO: 8416 - protein, 4 aa, Artificial Sequence
  Description of Artificial Sequence: Synthetic peptide
GLGL

SEQ ID NO: 8417 - protein, 4 aa, Artificial Sequence
  Description of Artificial Sequence: Synthetic peptide
GHGY

SEQ ID NO: 8418 - protein, 4 aa, Artificial Sequence
  Description of Artificial Sequence: Synthetic peptide
RRVY

SEQ ID NO: 8419 - protein, 4 aa, Artificial Sequence
  Description of Artificial Sequence: Synthetic peptide
GLGW

SEQ ID NO: 8420 - protein, 4 aa, Artificial Sequence
  Description of Artificial Sequence: Synthetic peptide
GHGL

SEQ ID NO: 8421 - protein, 4 aa, Artificial Sequence
  Description of Artificial Sequence: Synthetic peptide
GLGY

SEQ ID NO: 8422 - protein, 4 aa, Artificial Sequence
  Description of Artificial Sequence: Synthetic peptide
PVGY

SEQ ID NO: 8423 - protein, 4 aa, Artificial Sequence
  Description of Artificial Sequence: Synthetic peptide
GPGY

SEQ ID NO: 8424 - protein, 4 aa, Artificial Sequence
  Description of Artificial Sequence: Synthetic peptide
GPGW

SEQ ID NO: 8425 - protein, 4 aa, Artificial Sequence
  Description of Artificial Sequence: Synthetic peptide
GPGL

SEQ ID NO: 8426 - protein, 4 aa, Artificial Sequence
  Description of Artificial Sequence: Synthetic peptide
GVTA

SEQ ID NO: 8427 - protein, 4 aa, Artificial Sequence
  Description of Artificial Sequence: Synthetic peptide
GRLY

SEQ ID NO: 8428 - protein, 4 aa, Artificial Sequence
  Description of Artificial Sequence: Synthetic peptide
RRAY

SEQ ID NO: 8429 - protein, 4 aa, Artificial Sequence
  Description of Artificial Sequence: Synthetic peptide
GHTQ

SEQ ID NO: 8430 - protein, 4 aa, Artificial Sequence
  Description of Artificial Sequence: Synthetic peptide
GVGL

SEQ ID NO: 8431 - protein, 4 aa, Artificial Sequence
  Description of Artificial Sequence: Synthetic peptide
RRQY

SEQ ID NO: 8432 - protein, 4 aa, Artificial Sequence
  Description of Artificial Sequence: Synthetic peptide
GATQ

SEQ ID NO: 8433 - protein, 4 aa, Artificial Sequence
  Description of Artificial Sequence: Synthetic peptide
PFGY

SEQ ID NO: 8434 - protein, 4 aa, Artificial Sequence
  Description of Artificial Sequence: Synthetic peptide
GVGY

SEQ ID NO: 8435 - protein, 4 aa, Artificial Sequence
  Description of Artificial Sequence: Synthetic peptide
GVGW

SEQ ID NO: 8436 - protein, 4 aa, Artificial Sequence
  Description of Artificial Sequence: Synthetic peptide
GATA

SEQ ID NO: 8437 - protein, 4 aa, Artificial Sequence
  Description of Artificial Sequence: Synthetic peptide
GRAY

SEQ ID NO: 8438 - protein, 4 aa, Artificial Sequence
  Description of Artificial Sequence: Synthetic peptide
GRMY

SEQ ID NO: 8439 - protein, 4 aa, Artificial Sequence
  Description of Artificial Sequence: Synthetic peptide
GRTY

SEQ ID NO: 8440 - protein, 4 aa, Artificial Sequence
  Description of Artificial Sequence: Synthetic peptide
PPGY

SEQ ID NO: 8441 - protein, 4 aa, Artificial Sequence
  Description of Artificial Sequence: Synthetic peptide
RRPY

SEQ ID NO: 8442 - protein, 4 aa, Artificial Sequence
  Description of Artificial Sequence: Synthetic peptide
RHGY

SEQ ID NO: 8443 - protein, 4 aa, Artificial Sequence
  Description of Artificial Sequence: Synthetic peptide
SVGY

SEQ ID NO: 8444 - protein, 4 aa, Artificial Sequence
  Description of Artificial Sequence: Synthetic peptide
GVTQ

SEQ ID NO: 8445 - protein, 4 aa, Artificial Sequence
  Description of Artificial Sequence: Synthetic peptide
GDGW

SEQ ID NO: 8446 - protein, 4 aa, Artificial Sequence
  Description of Artificial Sequence: Synthetic peptide
GRQY

SEQ ID NO: 8447 - protein, 4 aa, Artificial Sequence
  Description of Artificial Sequence: Synthetic peptide
GDGL

SEQ ID NO: 8448 - protein, 4 aa, Artificial Sequence
  Description of Artificial Sequence: Synthetic peptide
SHGY

SEQ ID NO: 8449 - protein, 4 aa, Artificial Sequence
  Description of Artificial Sequence: Synthetic peptide
GFGY

SEQ ID NO: 8450 - protein, 4 aa, Artificial Sequence
  Description of Artificial Sequence: Synthetic peptide
GFGW

SEQ ID NO: 8451 - protein, 4 aa, Artificial Sequence
  Description of Artificial Sequence: Synthetic peptide
GSGW

SEQ ID NO: 8452 - protein, 4 aa, Artificial Sequence
  Description of Artificial Sequence: Synthetic peptide
GFGL

SEQ ID NO: 8453 - protein, 4 aa, Artificial Sequence
  Description of Artificial Sequence: Synthetic peptide
GSGL

SEQ ID NO: 8454 - protein, 4 aa, Artificial Sequence
  Description of Artificial Sequence: Synthetic peptide
RRLY

SEQ ID NO: 8455 - protein, 4 aa, Artificial Sequence
  Description of Artificial Sequence: Synthetic peptide
GFTA

SEQ ID NO: 8456 - protein, 4 aa, Artificial Sequence
  Description of Artificial Sequence: Synthetic peptide
PLGY

SEQ ID NO: 8457 - protein, 4 aa, Artificial Sequence
  Description of Artificial Sequence: Synthetic peptide
GYTQ

SEQ ID NO: 8458 - protein, 4 aa, Artificial Sequence
  Description of Artificial Sequence: Synthetic peptide
GLTQ

SEQ ID NO: 8459 - protein, 4 aa, Artificial Sequence
  Description of Artificial Sequence: Synthetic peptide
GHTA

SEQ ID NO: 8460 - protein, 4 aa, Artificial Sequence
  Description of Artificial Sequence: Synthetic peptide
PHGY

SEQ ID NO: 8461 - protein, 4 aa, Artificial Sequence
  Description of Artificial Sequence: Synthetic peptide
GFTQ

SEQ ID NO: 8462 - protein, 4 aa, Artificial Sequence
  Description of Artificial Sequence: Synthetic peptide
GRVY

SEQ ID NO: 8463 - protein, 4 aa, Artificial Sequence
  Description of Artificial Sequence: Synthetic peptide
GYTA

SEQ ID NO: 8464 - protein, 4 aa, Artificial Sequence
  Description of Artificial Sequence: Synthetic peptide
GLTA

SEQ ID NO: 8465 - protein, 4 aa, Artificial Sequence
  Description of Artificial Sequence: Synthetic peptide
RRKY

SEQ ID NO: 8466 - protein, 4 aa, Artificial Sequence
  Description of Artificial Sequence: Synthetic peptide
GPTQ

SEQ ID NO: 8467 - protein, 4 aa, Artificial Sequence
  Description of Artificial Sequence: Synthetic peptide
GPTA

SEQ ID NO: 8468 - protein, 4 aa, Artificial Sequence
  Description of Artificial Sequence: Synthetic peptide
GDTQ

SEQ ID NO: 8469 - protein, 4 aa, Artificial Sequence
  Description of Artificial Sequence: Synthetic peptide
GAGW

SEQ ID NO: 8470 - protein, 4 aa, Artificial Sequence
  Description of Artificial Sequence: Synthetic peptide
GDTA

SEQ ID NO: 8471 - protein, 4 aa, Artificial Sequence
  Description of Artificial Sequence: Synthetic peptide
SFGY

SEQ ID NO: 8472 - protein, 4 aa, Artificial Sequence
  Description of Artificial Sequence: Synthetic peptide
GAGL

SEQ ID NO: 8473 - protein, 4 aa, Artificial Sequence
  Description of Artificial Sequence: Synthetic peptide
GSTQ

SEQ ID NO: 8474 - protein, 4 aa, Artificial Sequence
  Description of Artificial Sequence: Synthetic peptide
GRPY

SEQ ID NO: 8475 - protein, 4 aa, Artificial Sequence
  Description of Artificial Sequence: Synthetic peptide
SLGY

SEQ ID NO: 8476 - protein, 4 aa, Artificial Sequence
  Description of Artificial Sequence: Synthetic peptide
GSTA

SEQ ID NO: 8477 - protein, 4 aa, Artificial Sequence
  Description of Artificial Sequence: Synthetic peptide
GYGL

SEQ ID NO: 8478 - protein, 4 aa, Artificial Sequence
  Description of Artificial Sequence: Synthetic peptide
RREY

SEQ ID NO: 8479 - protein, 4 aa, Artificial Sequence
  Description of Artificial Sequence: Synthetic peptide
SPGY

SEQ ID NO: 8480 - protein, 4 aa, Artificial Sequence
  Description of Artificial Sequence: Synthetic peptide
RRTY

SEQ ID NO: 8481 - protein, 4 aa, Artificial Sequence
  Description of Artificial Sequence: Synthetic peptide
GYGW

SEQ ID NO: 8482 - protein, 4 aa, Artificial Sequence
  Description of Artificial Sequence: Synthetic peptide
RRMY

SEQ ID NO: 8483 - DNA, 33 bp, Artificial Sequence
  Description of Artificial Sequence: Synthetic oligonucleotide
tggggacagggtacattggtcaccgtctcctca

SEQ ID NO: 8484 - DNA, 36 bp, Artificial Sequence
  Description of Artificial Sequence: Synthetic oligonucleotide
cattggggacagggtacattggtcaccgtctcctca

SEQ ID NO: 8485 - DNA, 36 bp, Artificial Sequence
  Description of Artificial Sequence: Synthetic oligonucleotide
atttggggacagggtacattggtcaccgtctcctca

SEQ ID NO: 8486 - DNA, 36 bp, Artificial Sequence
  Description of Artificial Sequence: Synthetic oligonucleotide
tactggggacagggtacattggtcaccgtctcctca

SEQ ID NO: 8487 - DNA, 36 bp, Artificial Sequence
  Description of Artificial Sequence: Synthetic oligonucleotide
ccatggggacagggtacattggtcaccgtctcctca

SEQ ID NO: 8488 - DNA, 36 bp, Artificial Sequence
  Description of Artificial Sequence: Synthetic oligonucleotide
gtctggggacagggtacattggtcaccgtctcctca

SEQ ID NO: 8489 - DNA, 36 bp, Artificial Sequence
  Description of Artificial Sequence: Synthetic oligonucleotide
gattggggacagggtacattggtcaccgtctcctca

SEQ ID NO: 8490 - DNA, 36 bp, Artificial Sequence
  Description of Artificial Sequence: Synthetic oligonucleotide
ttctggggacagggtacattggtcaccgtctcctca

SEQ ID NO: 8491 - DNA, 36 bp, Artificial Sequence
  Description of Artificial Sequence: Synthetic oligonucleotide
aattggggacagggtacattggtcaccgtctcctca

SEQ ID NO: 8492 - DNA, 36 bp, Artificial Sequence
  Description of Artificial Sequence: Synthetic oligonucleotide
agttggggacagggtacattggtcaccgtctcctca

SEQ ID NO: 8493 - DNA, 36 bp, Artificial Sequence
  Description of Artificial Sequence: Synthetic oligonucleotide
acttggggacagggtacattggtcaccgtctcctca

SEQ ID NO: 8494 - DNA, 36 bp, Artificial Sequence
  Description of Artificial Sequence: Synthetic oligonucleotide
gcatggggacagggtacattggtcaccgtctcctca

SEQ ID NO: 8495 - DNA, 39 bp, Artificial Sequence
  Description of Artificial Sequence: Synthetic oligonucleotide
gattactggggacagggtacattggtcaccgtctcctca

SEQ ID NO: 8496 - DNA, 39 bp, Artificial Sequence
  Description of Artificial Sequence: Synthetic oligonucleotide
gcttactggggacagggtacattggtcaccgtctcctca

SEQ ID NO: 8497 - DNA, 39 bp, Artificial Sequence
  Description of Artificial Sequence: Synthetic oligonucleotide
ttctactggggacagggtacattggtcaccgtctcctca

SEQ ID NO: 8498 - DNA, 39 bp, Artificial Sequence
  Description of Artificial Sequence: Synthetic oligonucleotide
ggctattggggacagggtacattggtcaccgtctcctca

SEQ ID NO: 8499 - DNA, 39 bp, Artificial Sequence
  Description of Artificial Sequence: Synthetic oligonucleotide
cattactggggacagggtacattggtcaccgtctcctca

SEQ ID NO: 8500 - DNA, 39 bp, Artificial Sequence
  Description of Artificial Sequence: Synthetic oligonucleotide
agttactggggacagggtacattggtcaccgtctcctca

SEQ ID NO: 8501 - DNA, 39 bp, Artificial Sequence
  Description of Artificial Sequence: Synthetic oligonucleotide
gtttattggggacagggtacattggtcaccgtctcctca

SEQ ID NO: 8502 - DNA, 39 bp, Artificial Sequence
  Description of Artificial Sequence: Synthetic oligonucleotide
tactattggggacagggtacattggtcaccgtctcctca

SEQ ID NO: 8503 - DNA, 39 bp, Artificial Sequence
  Description of Artificial Sequence: Synthetic oligonucleotide
csatactggggacagggtacattggtcaccgtctcctca

SEQ ID NO: 8504 - DNA, 39 bp, Artificial Sequence
  Description of Artificial Sequence: Synthetic oligonucleotide
racatatggggtcagggtacaatggtcaccgtctcctca

SEQ ID NO: 8505 - DNA, 39 bp, Artificial Sequence
  Description of Artificial Sequence: Synthetic oligonucleotide
racccatggggacagggtacattggtcaccgtctcctca

SEQ ID NO: 8506 - DNA, 39 bp, Artificial Sequence
  Description of Artificial Sequence: Synthetic oligonucleotide
racgtatggggtcagggtacaatggtcaccgtctcctca

SEQ ID NO: 8507 - DNA, 39 bp, Artificial Sequence
  Description of Artificial Sequence: Synthetic oligonucleotide
amctactggggacagggtacattggtcaccgtctcctca

SEQ ID NO: 8508 - DNA, 39 bp, Artificial Sequence
  Description of Artificial Sequence: Synthetic oligonucleotide
mtatactggggacagggtacattggtcaccgtctcctca

SEQ ID NO: 8509 - DNA, 42 bp, Artificial Sequence
  Description of Artificial Sequence: Synthetic oligonucleotide
ttcgattattggggacagggtacattggtcaccgtctcctca

SEQ ID NO: 8510 - DNA, 42 bp, Artificial Sequence
  Description of Artificial Sequence: Synthetic oligonucleotide
attgactactggggacagggtacattggtcaccgtctcctca

SEQ ID NO: 8511 - DNA, 42 bp, Artificial Sequence
  Description of Artificial Sequence: Synthetic oligonucleotide
gtggactactggggacagggtacattggtcaccgtctcctca

SEQ ID NO: 8512 - DNA, 42 bp, Artificial Sequence
  Description of Artificial Sequence: Synthetic oligonucleotide
ttagattactggggacagggtacattggtcaccgtctcctca

SEQ ID NO: 8513 - DNA, 42 bp, Artificial Sequence
  Description of Artificial Sequence: Synthetic oligonucleotide
tccgattattggggacagggtacattggtcaccgtctcctca

SEQ ID NO: 8514 - DNA, 42 bp, Artificial Sequence
  Description of Artificial Sequence: Synthetic oligonucleotide
cacgattactggggacagggtacattggtcaccgtctcctca

SEQ ID NO: 8515 - DNA, 42 bp, Artificial Sequence
  Description of Artificial Sequence: Synthetic oligonucleotide
agagactactggggacagggtacattggtcaccgtctcctca

SEQ ID NO: 8516 - DNA, 42 bp, Artificial Sequence
  Description of Artificial Sequence: Synthetic oligonucleotide
ccagattactggggacagggtacattggtcaccgtctcctca

SEQ ID NO: 8517 - DNA, 42 bp, Artificial Sequence
  Description of Artificial Sequence: Synthetic oligonucleotide
aacgattactggggacagggtacattggtcaccgtctcctca

SEQ ID NO: 8518 - DNA, 42 bp, Artificial Sequence
  Description of Artificial Sequence: Synthetic oligonucleotide
actgattactggggacagggtacattggtcaccgtctcctca

SEQ ID NO: 8519 - DNA, 42 bp, Artificial Sequence
  Description of Artificial Sequence: Synthetic oligonucleotide
gatgattattggggacagggtacattggtcaccgtctcctca

SEQ ID NO: 8520 - DNA, 42 bp, Artificial Sequence
  Description of Artificial Sequence: Synthetic oligonucleotide
ggtgattattggggacagggtacattggtcaccgtctcctca

SEQ ID NO: 8521 - DNA, 42 bp, Artificial Sequence
  Description of Artificial Sequence: Synthetic oligonucleotide
gcagactactggggacagggtacattggtcaccgtctcctca

SEQ ID NO: 8522 - DNA, 42 bp, Artificial Sequence
  Description of Artificial Sequence: Synthetic oligonucleotide
tacgattattggggacagggtacattggtcaccgtctcctca

SEQ ID NO: 8523 - DNA, 42 bp, Artificial Sequence
  Description of Artificial Sequence: Synthetic oligonucleotide
ttcgatccctggggacagggtacattggtcaccgtctcctca

SEQ ID NO: 8524 - DNA, 42 bp, Artificial Sequence
  Description of Artificial Sequence: Synthetic oligonucleotide
atggatgtgtggggccagggaacaactgtcaccgtctcctca

SEQ ID NO: 8525 - DNA, 42 bp, Artificial Sequence
  Description of Artificial Sequence: Synthetic oligonucleotide
ttmcaacactggggacagggtacattggtcaccgtctcctca

SEQ ID NO: 8526 - DNA, 42 bp, Artificial Sequence
  Description of Artificial Sequence: Synthetic oligonucleotide
stagacgtatggggtcagggtacaatggtcaccgtctcctca

SEQ ID NO: 8527 - DNA, 42 bp, Artificial Sequence
  Description of Artificial Sequence: Synthetic oligonucleotide
ttmgacatatggggtcagggtacaatggtcaccgtctcctca

SEQ ID NO: 8528 - DNA, 42 bp, Artificial Sequence
  Description of Artificial Sequence: Synthetic oligonucleotide
ttmgacctatgggggagaggtaccttggtcaccgtctcctca

SEQ ID NO: 8529 - DNA, 42 bp, Artificial Sequence
  Description of Artificial Sequence: Synthetic oligonucleotide
tyagacccatggggacagggtacattggtcaccgtctcctca

SEQ ID NO: 8530 - DNA, 45 bp, Artificial Sequence
  Description of Artificial Sequence: Synthetic oligonucleotide
gcctttgatatttggggtcagggtacaatggtcaccgtctcctca

SEQ ID NO: 8531 - DNA, 45 bp, Artificial Sequence
  Description of Artificial Sequence: Synthetic oligonucleotide
tactttgactactggggacagggtacattggtcaccgtctcctca

SEQ ID NO: 8532 - DNA, 45 bp, Artificial Sequence
  Description of Artificial Sequence: Synthetic oligonucleotide
aatttcgactactggggacagggtacattggtcaccgtctcctca

SEQ ID NO: 8533 - DNA, 45 bp, Artificial Sequence
  Description of Artificial Sequence: Synthetic oligonucleotide
gacttcgactattggggacagggtacattggtcaccgtctcctca

SEQ ID NO: 8534 - DNA, 45 bp, Artificial Sequence
  Description of Artificial Sequence: Synthetic oligonucleotide
catttcgattactggggacagggtacattggtcaccgtctcctca

SEQ ID NO: 8535 - DNA, 45 bp, Artificial Sequence
  Description of Artificial Sequence: Synthetic oligonucleotide
ttctttgattattggggacagggtacattggtcaccgtctcctca

SEQ ID NO: 8536 - DNA, 45 bp, Artificial Sequence
  Description of Artificial Sequence: Synthetic oligonucleotide
tcttttgattattggggacagggtacattggtcaccgtctcctca

SEQ ID NO: 8537 - DNA, 45 bp, Artificial Sequence
  Description of Artificial Sequence: Synthetic oligonucleotide
agattcgactactggggacagggtacattggtcaccgtctcctca

SEQ ID NO: 8538 - DNA, 45 bp, Artificial Sequence
  Description of Artificial Sequence: Synthetic oligonucleotide
ttgttcgactactggggacagggtacattggtcaccgtctcctca

SEQ ID NO: 8539 - DNA, 45 bp, Artificial Sequence
  Description of Artificial Sequence: Synthetic oligonucleotide
cccttcgactattggggacagggtacattggtcaccgtctcctca

SEQ ID NO: 8540 - DNA, 45 bp, Artificial Sequence
  Description of Artificial Sequence: Synthetic oligonucleotide
attttcgattattggggacagggtacattggtcaccgtctcctca

SEQ ID NO: 8541 - DNA, 45 bp, Artificial Sequence
  Description of Artificial Sequence: Synthetic oligonucleotide
acctttgattactggggacagggtacattggtcaccgtctcctca

SEQ ID NO: 8542 - DNA, 45 bp, Artificial Sequence
  Description of Artificial Sequence: Synthetic oligonucleotide
ggattcgattactggggacagggtacattggtcaccgtctcctca

SEQ ID NO: 8543 - DNA, 45 bp, Artificial Sequence
  Description of Artificial Sequence: Synthetic oligonucleotide
gttttcgattactggggacagggtacattggtcaccgtctcctca

SEQ ID NO: 8544 - DNA, 45 bp, Artificial Sequence
  Description of Artificial Sequence: Synthetic oligonucleotide
gcttttgactactggggacagggtacattggtcaccgtctcctca

SEQ ID NO: 8545 - DNA, 45 bp, Artificial Sequence
  Description of Artificial Sequence: Synthetic oligonucleotide
tggtttgatccatggggacagggtacattggtcaccgtctcctca

SEQ ID NO: 8546 - DNA, 45 bp, Artificial Sequence
  Description of Artificial Sequence: Synthetic oligonucleotide
ggaatggacgtatggggccagggaacaactgtcaccgtctcctca

SEQ ID NO: 8547 - DNA, 45 bp, Artificial Sequence
  Description of Artificial Sequence: Synthetic oligonucleotide
ycaatggacgtatggggccagggaacaactgtcaccgtctcctca

SEQ ID NO: 8548 - DNA, 45 bp, Artificial Sequence
  Description of Artificial Sequence: Synthetic oligonucleotide
kacatggacgtatggggcaagggtacaactgtcaccgtctcctca

SEQ ID NO: 8549 - DNA, 45 bp, Artificial Sequence
  Description of Artificial Sequence: Synthetic oligonucleotide
stattcgacatatggggtcagggtacaatggtcaccgtctcctca

SEQ ID NO: 8550 - DNA, 45 bp, Artificial Sequence
  Description of Artificial Sequence: Synthetic oligonucleotide
kacttcgacctatgggggagaggtaccttggtcaccgtctcctca

SEQ ID NO: 8551 - DNA, 45 bp, Artificial Sequence
  Description of Artificial Sequence: Synthetic oligonucleotide
kacttccaacactggggacagggtacattggtcaccgtctcctca

SEQ ID NO: 8552 - DNA, 45 bp, Artificial Sequence
  Description of Artificial Sequence: Synthetic oligonucleotide
gsattcgacccatggggacagggtacattggtcaccgtctcctca

SEQ ID NO: 8553 - DNA, 45 bp, Artificial Sequence
  Description of Artificial Sequence: Synthetic oligonucleotide
ycattcgacatatggggtcagggtacaatggtcaccgtctcctca

SEQ ID NO: 8554 - DNA, 45 bp, Artificial Sequence
  Description of Artificial Sequence: Synthetic oligonucleotide
agmttcgacccatggggacagggtacattggtcaccgtctcctca

SEQ ID NO: 8555 - DNA, 48 bp, Artificial Sequence
  Description of Artificial Sequence: Synthetic oligonucleotide
tggtacttcgacttatgggggagaggtaccttggtcaccgtctcctca

SEQ ID NO: 8556 - DNA, 48 bp, Artificial Sequence
  Description of Artificial Sequence: Synthetic oligonucleotide
gacgcatttgatatatggggtcagggtacaatggtcaccgtctcctca

SEQ ID NO: 8557 - DNA, 48 bp, Artificial Sequence
  Description of Artificial Sequence: Synthetic oligonucleotide
tacgcatttgatatttggggtcagggtacaatggtcaccgtctcctca

SEQ ID NO: 8558 - DNA, 48 bp, Artificial Sequence
  Description of Artificial Sequence: Synthetic oligonucleotide
cacgcattcgacatctggggtcagggtacaatggtcaccgtctcctca

SEQ ID NO: 8559 - DNA, 48 bp, Artificial Sequence
  Description of Artificial Sequence: Synthetic oligonucleotide
ttcgcattcgatatctggggtcagggtacaatggtcaccgtctcctca

SEQ ID NO: 8560 - DNA, 48 bp, Artificial Sequence
  Description of Artificial Sequence: Synthetic oligonucleotide
tcagctttcgacatatggggtcagggtacaatggtcaccgtctcctca

SEQ ID NO: 8561 - DNA, 48 bp, Artificial Sequence
  Description of Artificial Sequence: Synthetic oligonucleotide
agagccttcgatatatggggtcagggtacaatggtcaccgtctcctca

SEQ ID NO: 8562 - DNA, 48 bp, Artificial Sequence
  Description of Artificial Sequence: Synthetic oligonucleotide
ttagccttcgatatctggggtcagggtacaatggtcaccgtctcctca

SEQ ID NO: 8563 - DNA, 48 bp, Artificial Sequence
  Description of Artificial Sequence: Synthetic oligonucleotide
ggagccttcgacatatggggtcagggtacaatggtcaccgtctcctca

SEQ ID NO: 8564 - DNA, 48 bp, Artificial Sequence
  Description of Artificial Sequence: Synthetic oligonucleotide
gactattttgattactggggacagggtacattggtcaccgtctcctca

SEQ ID NO: 8565 - DNA, 48 bp, Artificial Sequence
  Description of Artificial Sequence: Synthetic oligonucleotide
tattactttgattactggggacagggtacattggtcaccgtctcctca

SEQ ID NO: 8566 - DNA, 48 bp, Artificial Sequence
  Description of Artificial Sequence: Synthetic oligonucleotide
cactatttcgactattggggacagggtacattggtcaccgtctcctca

SEQ ID NO: 8567 - DNA, 48 bp, Artificial Sequence
  Description of Artificial Sequence: Synthetic oligonucleotide
ttctattttgattactggggacagggtacattggtcaccgtctcctca

SEQ ID NO: 8568 - DNA, 48 bp, Artificial Sequence
  Description of Artificial Sequence: Synthetic oligonucleotide
agttattttgactattggggacagggtacattggtcaccgtctcctca

SEQ ID NO: 8569 - DNA, 48 bp, Artificial Sequence
  Description of Artificial Sequence: Synthetic oligonucleotide
agatactttgattactggggacagggtacattggtcaccgtctcctca

SEQ ID NO: 8570 - DNA, 48 bp, Artificial Sequence
  Description of Artificial Sequence: Synthetic oligonucleotide
ttatatttcgactattggggacagggtacattggtcaccgtctcctca

SEQ ID NO: 8571 - DNA, 48 bp, Artificial Sequence
  Description of Artificial Sequence: Synthetic oligonucleotide
ccctactttgactattggggacagggtacattggtcaccgtctcctca

SEQ ID NO: 8572 - DNA, 48 bp, Artificial Sequence
  Description of Artificial Sequence: Synthetic oligonucleotide
ggatatttcgattattggggacagggtacattggtcaccgtctcctca

SEQ ID NO: 8573 - DNA, 48 bp, Artificial Sequence
  Description of Artificial Sequence: Synthetic oligonucleotide
gtttactttgattattggggacagggtacattggtcaccgtctcctca

SEQ ID NO: 8574 - DNA, 48 bp, Artificial Sequence
  Description of Artificial Sequence: Synthetic oligonucleotide
gcttactttgattattggggacagggtacattggtcaccgtctcctca

SEQ ID NO: 8575 - DNA, 48 bp, Artificial Sequence
  Description of Artificial Sequence: Synthetic oligonucleotide
aactacttcgattactggggacagggtacattggtcaccgtctcctca

SEQ ID NO: 8576 - DNA, 48 bp, Artificial Sequence
  Description of Artificial Sequence: Synthetic oligonucleotide
aattggttcgatccttggggacagggtacattggtcaccgtctcctca

SEQ ID NO: 8577 - DNA, 48 bp, Artificial Sequence
  Description of Artificial Sequence: Synthetic oligonucleotide
gattggtttgatccatggggacagggtacattggtcaccgtctcctca

SEQ ID NO: 8578 - DNA, 48 bp, Artificial Sequence
  Description of Artificial Sequence: Synthetic oligonucleotide
tattggtttgatccatggggacagggtacattggtcaccgtctcctca

SEQ ID NO: 8579 - DNA, 48 bp, Artificial Sequence
  Description of Artificial Sequence: Synthetic oligonucleotide
cactggttcgatccatggggacagggtacattggtcaccgtctcctca

SEQ ID NO: 8580 - DNA, 48 bp, Artificial Sequence
  Description of Artificial Sequence: Synthetic oligonucleotide
ttctggtttgacccctggggacagggtacattggtcaccgtctcctca

SEQ ID NO: 8581 - DNA, 48 bp, Artificial Sequence
  Description of Artificial Sequence: Synthetic oligonucleotide
tcttggtttgatccctggggacagggtacattggtcaccgtctcctca

SEQ ID NO: 8582 - DNA, 48 bp, Artificial Sequence
  Description of Artificial Sequence: Synthetic oligonucleotide
agatggtttgatccttggggacagggtacattggtcaccgtctcctca

SEQ ID NO: 8583 - DNA, 48 bp, Artificial Sequence
  Description of Artificial Sequence: Synthetic oligonucleotide
ggttggttcgatccctggggacagggtacattggtcaccgtctcctca

SEQ ID NO: 8584 - DNA, 48 bp, Artificial Sequence
  Description of Artificial Sequence: Synthetic oligonucleotide
gcttggtttgatccatggggacagggtacattggtcaccgtctcctca

SEQ ID NO: 8585 - DNA, 48 bp, Artificial Sequence
  Description of Artificial Sequence: Synthetic oligonucleotide
tacggtatggacgtttggggccagggaacaactgtcaccgtctcctca

SEQ ID NO: 8586 - DNA, 48 bp, Artificial Sequence
  Description of Artificial Sequence: Synthetic oligonucleotide
gatgggatggatgtttggggccagggaacaactgtcaccgtctcctca

SEQ ID NO: 8587 - DNA, 48 bp, Artificial Sequence
  Description of Artificial Sequence: Synthetic oligonucleotide
scagcattcgacatatggggtcagggtacaatggtcaccgtctcctca

SEQ ID NO: 8588 - DNA, 48 bp, Artificial Sequence
  Description of Artificial Sequence: Synthetic oligonucleotide
mcatggttcgacccatggggacagggtacattggtcaccgtctcctca

SEQ ID NO: 8589 - DNA, 48 bp, Artificial Sequence
  Description of Artificial Sequence: Synthetic oligonucleotide
rgctacttcgacctatgggggagaggtaccttggtcaccgtctcctca

SEQ ID NO: 8590 - DNA, 48 bp, Artificial Sequence
  Description of Artificial Sequence: Synthetic oligonucleotide
ayatacttcgactactggggacagggtacattggtcaccgtctcctca

SEQ ID NO: 8591 - DNA, 48 bp, Artificial Sequence
  Description of Artificial Sequence: Synthetic oligonucleotide
rtatggttcgacccatggggacagggtacattggtcaccgtctcctca

SEQ ID NO: 8592 - DNA, 48 bp, Artificial Sequence
  Description of Artificial Sequence: Synthetic oligonucleotide
cwcggaatggacgtatggggccagggaacaactgtcaccgtctcctca

SEQ ID NO: 8593 - DNA, 48 bp, Artificial Sequence
  Description of Artificial Sequence: Synthetic oligonucleotide
kcaggaatggacgtatggggccagggaacaactgtcaccgtctcctca

SEQ ID NO: 8594 - DNA, 48 bp, Artificial Sequence
  Description of Artificial Sequence: Synthetic oligonucleotide
rtagcattcgacatatggggtcagggtacaatggtcaccgtctcctca

SEQ ID NO: 8595 - DNA, 48 bp, Artificial Sequence
  Description of Artificial Sequence: Synthetic oligonucleotide
ragtacttccaacactggggacagggtacattggtcaccgtctcctca

SEQ ID NO: 8596 - DNA, 48 bp, Artificial Sequence
  Description of Artificial Sequence: Synthetic oligonucleotide
amcgcattcgacatatggggtcagggtacaatggtcaccgtctcctca

SEQ ID NO: 8597 - DNA, 48 bp, Artificial Sequence
  Description of Artificial Sequence: Synthetic oligonucleotide
ckatacttcgacctatgggggagaggtaccttggtcaccgtctcctca

SEQ ID NO: 8598 - DNA, 48 bp, Artificial Sequence
  Description of Artificial Sequence: Synthetic oligonucleotide
kactacatggacgtatggggcaagggtacaactgtcaccgtctcctca

SEQ ID NO: 8599 - DNA, 51 bp, Artificial Sequence
  Description of Artificial Sequence: Synthetic oligonucleotide
tactggtacttcgatttgtgggggagaggtaccttggtcaccgtctcctca

SEQ ID NO: 8600 - DNA, 51 bp, Artificial Sequence
  Description of Artificial Sequence: Synthetic oligonucleotide
gattggtacttcgatttatgggggagaggtaccttggtcaccgtctcctca

SEQ ID NO: 8601 - DNA, 51 bp, Artificial Sequence
  Description of Artificial Sequence: Synthetic oligonucleotide
gataattggttcgatccatggggacagggtacattggtcaccgtctcctca

SEQ ID NO: 8602 - DNA, 51 bp, Artificial Sequence
  Description of Artificial Sequence: Synthetic oligonucleotide
tataactggttcgatccctggggacagggtacattggtcaccgtctcctca

SEQ ID NO: 8603 - DNA, 51 bp, Artificial Sequence
  Description of Artificial Sequence: Synthetic oligonucleotide
cacaattggttcgacccctggggacagggtacattggtcaccgtctcctca

SEQ ID NO: 8604 - DNA, 51 bp, Artificial Sequence
  Description of Artificial Sequence: Synthetic oligonucleotide
ttcaattggtttgatccctggggacagggtacattggtcaccgtctcctca

SEQ ID NO: 8605 - DNA, 51 bp, Artificial Sequence
  Description of Artificial Sequence: Synthetic oligonucleotide
agcaactggttcgacccatggggacagggtacattggtcaccgtctcctca

SEQ ID NO: 8606 - DNA, 51 bp, Artificial Sequence
  Description of Artificial Sequence: Synthetic oligonucleotide
agaaactggtttgatccatggggacagggtacattggtcaccgtctcctca

SEQ ID NO: 8607 - DNA, 51 bp, Artificial Sequence
  Description of Artificial Sequence: Synthetic oligonucleotide
ttaaattggttcgacccttggggacagggtacattggtcaccgtctcctca

SEQ ID NO: 8608 - DNA, 51 bp, Artificial Sequence
  Description of Artificial Sequence: Synthetic oligonucleotide
cccaattggtttgatccatggggacagggtacattggtcaccgtctcctca

SEQ ID NO: 8609 - DNA, 51 bp, Artificial Sequence
  Description of Artificial Sequence: Synthetic oligonucleotide
ataaattggttcgacccttggggacagggtacattggtcaccgtctcctca

SEQ ID NO: 8610 - DNA, 51 bp, Artificial Sequence
  Description of Artificial Sequence: Synthetic oligonucleotide
actaactggtttgacccatggggacagggtacattggtcaccgtctcctca

SEQ ID NO: 8611 - DNA, 51 bp, Artificial Sequence
  Description of Artificial Sequence: Synthetic oligonucleotide
ggtaactggtttgacccatggggacagggtacattggtcaccgtctcctca

SEQ ID NO: 8612 - DNA, 51 bp, Artificial Sequence
  Description of Artificial Sequence: Synthetic oligonucleotide
gtgaactggtttgatccctggggacagggtacattggtcaccgtctcctca

SEQ ID NO: 8613 - DNA, 51 bp, Artificial Sequence
  Description of Artificial Sequence: Synthetic oligonucleotide
gccaactggttcgatccctggggacagggtacattggtcaccgtctcctca

SEQ ID NO: 8614 - DNA, 51 bp, Artificial Sequence
  Description of Artificial Sequence: Synthetic oligonucleotide
aacaattggttcgacccatggggacagggtacattggtcaccgtctcctca

SEQ ID NO: 8615 - DNA, 51 bp, Artificial Sequence
  Description of Artificial Sequence: Synthetic oligonucleotide
tactacggcatggatgtatggggccagggaacaactgtcaccgtctcctca

SEQ ID NO: 8616 - DNA, 51 bp, Artificial Sequence
  Description of Artificial Sequence: Synthetic oligonucleotide
gattatggaatggacgtatggggccagggaacaactgtcaccgtctcctca

SEQ ID NO: 8617 - DNA, 51 bp, Artificial Sequence
  Description of Artificial Sequence: Synthetic oligonucleotide
ttctacggtatggatgtctggggccagggaacaactgtcaccgtctcctca

SEQ ID NO: 8618 - DNA, 51 bp, Artificial Sequence
  Description of Artificial Sequence: Synthetic oligonucleotide
cattacggaatggacgtatggggccagggaacaactgtcaccgtctcctca

SEQ ID NO: 8619 - DNA, 51 bp, Artificial Sequence
  Description of Artificial Sequence: Synthetic oligonucleotide
ttgtacggaatggacgtttggggccagggaacaactgtcaccgtctcctca

SEQ ID NO: 8620 - DNA, 51 bp, Artificial Sequence
  Description of Artificial Sequence: Synthetic oligonucleotide
aactatggcatggatgtgtggggccagggaacaactgtcaccgtctcctca

SEQ ID NO: 8621 - DNA, 51 bp, Artificial Sequence
  Description of Artificial Sequence: Synthetic oligonucleotide
cwctggtacttcgacctatgggggagaggtaccttggtcaccgtctcctca

SEQ ID NO: 8622 - DNA, 51 bp, Artificial Sequence
  Description of Artificial Sequence: Synthetic oligonucleotide
scatacggaatggacgtatggggccagggaacaactgtcaccgtctcctca

SEQ ID NO: 8623 - DNA, 51 bp, Artificial Sequence
  Description of Artificial Sequence: Synthetic oligonucleotide
scagaatacttccaacactggggacagggtacattggtcaccgtctcctca

SEQ ID NO: 8624 - DNA, 51 bp, Artificial Sequence
  Description of Artificial Sequence: Synthetic oligonucleotide
kactactacatggacgtatggggcaagggtacaactgtcaccgtctcctca

SEQ ID NO: 8625 - DNA, 51 bp, Artificial Sequence
  Description of Artificial Sequence: Synthetic oligonucleotide
gkatacggaatggacgtatggggccagggaacaactgtcaccgtctcctca

SEQ ID NO: 8626 - DNA, 51 bp, Artificial Sequence
  Description of Artificial Sequence: Synthetic oligonucleotide
akctacggaatggacgtatggggccagggaacaactgtcaccgtctcctca

SEQ ID NO: 8627 - DNA, 51 bp, Artificial Sequence
  Description of Artificial Sequence: Synthetic oligonucleotide
arctggtacttcgacctatgggggagaggtaccttggtcaccgtctcctca

SEQ ID NO: 8628 - DNA, 51 bp, Artificial Sequence
  Description of Artificial Sequence: Synthetic oligonucleotide
asatacggaatggacgtatggggccagggaacaactgtcaccgtctcctca

SEQ ID NO: 8629 - DNA, 54 bp, Artificial Sequence
  Description of Artificial Sequence: Synthetic oligonucleotide
tattactatggtatggatgtatggggccagggaacaactgtcaccgtctcctca

SEQ ID NO: 8630 - DNA, 54 bp, Artificial Sequence
  Description of Artificial Sequence: Synthetic oligonucleotide
tattactattatatggatgtttggggcaagggtacaactgtcaccgtctcctca

SEQ ID NO: 8631 - DNA, 54 bp, Artificial Sequence
  Description of Artificial Sequence: Synthetic oligonucleotide
gattactacggcatggatgtttggggccagggaacaactgtcaccgtctcctca

SEQ ID NO: 8632 - DNA, 54 bp, Artificial Sequence
  Description of Artificial Sequence: Synthetic oligonucleotide
aactactacggcatggacgtatggggccagggaacaactgtcaccgtctcctca

SEQ ID NO: 8633 - DNA, 54 bp, Artificial Sequence
  Description of Artificial Sequence: Synthetic oligonucleotide
cwctactacggaatggacgtatggggccagggaacaactgtcaccgtctcctca

SEQ ID NO: 8634 - DNA, 54 bp, Artificial Sequence
  Description of Artificial Sequence: Synthetic oligonucleotide
ractactactacatggacgtatggggcaagggtacaactgtcaccgtctcctca

SEQ ID NO: 8635 - DNA, 54 bp, Artificial Sequence
  Description of Artificial Sequence: Synthetic oligonucleotide
ycatactacggaatggacgtatggggccagggaacaactgtcaccgtctcctca

SEQ ID NO: 8636 - DNA, 57 bp, Artificial Sequence
  Description of Artificial Sequence: Synthetic oligonucleotide
tattactactacggaatggacgtttggggccagggaacaactgtcaccgtctcctca

SEQ ID NO: 8637 - DNA, 57 bp, Artificial Sequence
  Description of Artificial Sequence: Synthetic oligonucleotide
aattattattacggcatggacgtctggggccagggaacaactgtcaccgtctcctca

SEQ ID NO: 8638 - DNA, 57 bp, Artificial Sequence
  Description of Artificial Sequence: Synthetic oligonucleotide
gattactattacggtatggatgtctggggccagggaacaactgtcaccgtctcctca

SEQ ID NO: 8639 - DNA, 57 bp, Artificial Sequence
  Description of Artificial Sequence: Synthetic oligonucleotide
cactattactacggcatggacgtatggggccagggaacaactgtcaccgtctcctca

SEQ ID NO: 8640 - DNA, 57 bp, Artificial Sequence
  Description of Artificial Sequence: Synthetic oligonucleotide
ttctattattatggtatggatgtttggggccagggaacaactgtcaccgtctcctca

SEQ ID NO: 8641 - DNA, 57 bp, Artificial Sequence
  Description of Artificial Sequence: Synthetic oligonucleotide
tcttactactatgggatggacgtgtggggccagggaacaactgtcaccgtctcctca

SEQ ID NO: 8642 - DNA, 57 bp, Artificial Sequence
  Description of Artificial Sequence: Synthetic oligonucleotide
agatattactacggcatggatgtttggggccagggaacaactgtcaccgtctcctca

SEQ ID NO: 8643 - DNA, 57 bp, Artificial Sequence
  Description of Artificial Sequence: Synthetic oligonucleotide
ttatactactatgggatggatgtatggggccagggaacaactgtcaccgtctcctca

SEQ ID NO: 8644 - DNA, 57 bp, Artificial Sequence
  Description of Artificial Sequence: Synthetic oligonucleotide
ccttactactatggcatggacgtctggggccagggaacaactgtcaccgtctcctca

SEQ ID NO: 8645 - DNA, 57 bp, Artificial Sequence
  Description of Artificial Sequence: Synthetic oligonucleotide
acctattactatggtatggatgtgtggggccagggaacaactgtcaccgtctcctca

SEQ ID NO: 8646 - DNA, 57 bp, Artificial Sequence
  Description of Artificial Sequence: Synthetic oligonucleotide
ggatactactatgggatggacgtctggggccagggaacaactgtcaccgtctcctca

SEQ ID NO: 8647 - DNA, 57 bp, Artificial Sequence
  Description of Artificial Sequence: Synthetic oligonucleotide
gcctactattatggcatggacgtctggggccagggaacaactgtcaccgtctcctca

SEQ ID NO: 8648 - DNA, 57 bp, Artificial Sequence
  Description of Artificial Sequence: Synthetic oligonucleotide
tactactattattatatggacgtttggggcaagggtacaactgtcaccgtctcctca

SEQ ID NO: 8649 - DNA, 57 bp, Artificial Sequence
  Description of Artificial Sequence: Synthetic oligonucleotide
aactactactactatatggatgtttggggcaagggtacaactgtcaccgtctcctca

SEQ ID NO: 8650 - DNA, 57 bp, Artificial Sequence
  Description of Artificial Sequence: Synthetic oligonucleotide
gattattattactatatggacgtctggggcaagggtacaactgtcaccgtctcctca

SEQ ID NO: 8651 - DNA, 57 bp, Artificial Sequence
  Description of Artificial Sequence: Synthetic oligonucleotide
rtatactactacggaatggacgtatggggccagggaacaactgtcaccgtctcctca

SEQ ID NO: 8652 - DNA, 57 bp, Artificial Sequence
  Description of Artificial Sequence: Synthetic oligonucleotide
rgctactactactacatggacgtatggggcaagggtacaactgtcaccgtctcctca

SEQ ID NO: 8653 - DNA, 57 bp, Artificial Sequence
  Description of Artificial Sequence: Synthetic oligonucleotide
cmctactactactacatggacgtatggggcaagggtacaactgtcaccgtctcctca

SEQ ID NO: 8654 - DNA, 60 bp, Artificial Sequence
  Description of Artificial Sequence: Synthetic oligonucleotide
tattactattattacgggatggacgtatggggccagggaacaactgtcaccgtctcctca

SEQ ID NO: 8655 - DNA, 60 bp, Artificial Sequence
  Description of Artificial Sequence: Synthetic oligonucleotide
aattattattattatgggatggacgtatggggccagggaacaactgtcaccgtctcctca

SEQ ID NO: 8656 - DNA, 60 bp, Artificial Sequence
  Description of Artificial Sequence: Synthetic oligonucleotide
gactattactattatggaatggatgtatggggccagggaacaactgtcaccgtctcctca

SEQ ID NO: 8657 - DNA, 60 bp, Artificial Sequence
  Description of Artificial Sequence: Synthetic oligonucleotide
cattattattattacggaatggacgtttggggccagggaacaactgtcaccgtctcctca

SEQ ID NO: 8658 - DNA, 60 bp, Artificial Sequence
  Description of Artificial Sequence: Synthetic oligonucleotide
ttctattactattatggcatggatgtgtggggccagggaacaactgtcaccgtctcctca

SEQ ID NO: 8659 - DNA, 60 bp, Artificial Sequence
  Description of Artificial Sequence: Synthetic oligonucleotide
agctactactattatggtatggacgtgtggggccagggaacaactgtcaccgtctcctca

SEQ ID NO: 8660 - DNA, 60 bp, Artificial Sequence
  Description of Artificial Sequence: Synthetic oligonucleotide
agatattactactatggcatggatgtctggggccagggaacaactgtcaccgtctcctca

SEQ ID NO: 8661 - DNA, 60 bp, Artificial Sequence
  Description of Artificial Sequence: Synthetic oligonucleotide
ttatactactattacggcatggatgtctggggccagggaacaactgtcaccgtctcctca

SEQ ID NO: 8662 - DNA, 60 bp, Artificial Sequence
  Description of Artificial Sequence: Synthetic oligonucleotide
ccctattattactacggaatggacgtttggggccagggaacaactgtcaccgtctcctca

SEQ ID NO: 8663 - DNA, 60 bp, Artificial Sequence
  Description of Artificial Sequence: Synthetic oligonucleotide
atctattactattatggcatggatgtatggggccagggaacaactgtcaccgtctcctca

SEQ ID NO: 8664 - DNA, 60 bp, Artificial Sequence
  Description of Artificial Sequence: Synthetic oligonucleotide
acctattactactatggcatggacgtttggggccagggaacaactgtcaccgtctcctca

SEQ ID NO: 8665 - DNA, 60 bp, Artificial Sequence
  Description of Artificial Sequence: Synthetic oligonucleotide
ggctactattactatgggatggacgtctggggccagggaacaactgtcaccgtctcctca

SEQ ID NO: 8666 - DNA, 60 bp, Artificial Sequence
  Description of Artificial Sequence: Synthetic oligonucleotide
gtctactattattatggcatggacgtatggggccagggaacaactgtcaccgtctcctca

SEQ ID NO: 8667 - DNA, 60 bp, Artificial Sequence
  Description of Artificial Sequence: Synthetic oligonucleotide
gcttactattactacggcatggacgtatggggccagggaacaactgtcaccgtctcctca

SEQ ID NO: 8668 - DNA, 63 bp, Artificial Sequence
  Description of Artificial Sequence: Synthetic oligonucleotide
gattattattattactatggtatggatgtgtggggccagggaacaactgtcaccgtctcctca

SEQ ID NO: 8669 - DNA, 63 bp, Artificial Sequence
  Description of Artificial Sequence: Synthetic oligonucleotide
tactattactactattatggcatggacgtctggggccagggaacaactgtcaccgtctcctca

SEQ ID NO: 8670 - DNA, 63 bp, Artificial Sequence
  Description of Artificial Sequence: Synthetic oligonucleotide
cactactactattattatgggatggacgtatggggccagggaacaactgtcaccgtctcctca

SEQ ID NO: 8671 - DNA, 63 bp, Artificial Sequence
  Description of Artificial Sequence: Synthetic oligonucleotide
ttctattattattattacggaatggacgtctggggccagggaacaactgtcaccgtctcctca

SEQ ID NO: 8672 - DNA, 63 bp, Artificial Sequence
  Description of Artificial Sequence: Synthetic oligonucleotide
agctactattactactatgggatggatgtgtggggccagggaacaactgtcaccgtctcctca

SEQ ID NO: 8673 - DNA, 63 bp, Artificial Sequence
  Description of Artificial Sequence: Synthetic oligonucleotide
agatattactattactatggtatggacgtttggggccagggaacaactgtcaccgtctcctca

SEQ ID NO: 8674 - DNA, 63 bp, Artificial Sequence
  Description of Artificial Sequence: Synthetic oligonucleotide
ttgtactattactattatggaatggacgtttggggccagggaacaactgtcaccgtctcctca

SEQ ID NO: 8675 - DNA, 63 bp, Artificial Sequence
  Description of Artificial Sequence: Synthetic oligonucleotide
ccttactattattattatgggatggatgtctggggccagggaacaactgtcaccgtctcctca

SEQ ID NO: 8676 - DNA, 63 bp, Artificial Sequence
  Description of Artificial Sequence: Synthetic oligonucleotide
atatattactattactacgggatggatgtttggggccagggaacaactgtcaccgtctcctca

SEQ ID NO: 8677 - DNA, 63 bp, Artificial Sequence
  Description of Artificial Sequence: Synthetic oligonucleotide
acctactattattattacgggatggacgtttggggccagggaacaactgtcaccgtctcctca

SEQ ID NO: 8678 - DNA, 63 bp, Artificial Sequence
  Description of Artificial Sequence: Synthetic oligonucleotide
ggttactattattactacgggatggacgtgtggggccagggaacaactgtcaccgtctcctca

SEQ ID NO: 8679 - DNA, 63 bp, Artificial Sequence
  Description of Artificial Sequence: Synthetic oligonucleotide
gtgtattactattactacgggatggacgtgtggggccagggaacaactgtcaccgtctcctca

SEQ ID NO: 8680 - DNA, 63 bp, Artificial Sequence
  Description of Artificial Sequence: Synthetic oligonucleotide
gcctattactactactatgggatggatgtgtggggccagggaacaactgtcaccgtctcctca

SEQ ID NO: 8681 - DNA, 63 bp, Artificial Sequence
  Description of Artificial Sequence: Synthetic oligonucleotide
aattattattactattacggtatggacgtgtggggccagggaacaactgtcaccgtctcctca

SEQ ID NO: 8682 - DNA, 63 bp, Artificial Sequence
  Description of Artificial Sequence: Synthetic oligonucleotide
kactactactactactactacatggacgtatggggcaagggtacaactgtcaccgtctcctca

SEQ ID NO: 8683 - protein, 4 aa, Artificial Sequence
  Description of Artificial Sequence: Synthetic peptide
DMDV

SEQ ID NO: 8684 - protein, 4 aa, Artificial Sequence
  Description of Artificial Sequence: Synthetic peptide
PMDV

SEQ ID NO: 8685 - protein, 4 aa, Artificial Sequence
  Description of Artificial Sequence: Synthetic peptide
SMDV

SEQ ID NO: 8686 - protein, 5 aa, Artificial Sequence
  Description of Artificial Sequence: Synthetic peptide
DGMDV

SEQ ID NO: 8687 - protein, 5 aa, Artificial Sequence
  Description of Artificial Sequence: Synthetic peptide
SYFDL

SEQ ID NO: 8688 - protein, 5 aa, Artificial Sequence
  Description of Artificial Sequence: Synthetic peptide
LYFDL

SEQ ID NO: 8689 - protein, 5 aa, Artificial Sequence
  Description of Artificial Sequence: Synthetic peptide
DYMDV

SEQ ID NO: 8690 - protein, 5 aa, Artificial Sequence
  Description of Artificial Sequence: Synthetic peptide
HGMDV

SEQ ID NO: 8691 - protein, 5 aa, Artificial Sequence
  Description of Artificial Sequence: Synthetic peptide
LGMDV

SEQ ID NO: 8692 - protein, 5 aa, Artificial Sequence
  Description of Artificial Sequence: Synthetic peptide
SGMDV

SEQ ID NO: 8693 - protein, 5 aa, Artificial Sequence
  Description of Artificial Sequence: Synthetic peptide
AGMDV

SEQ ID NO: 8694 - protein, 6 aa, Artificial Sequence
  Description of Artificial Sequence: Synthetic peptide
DYGMDV

SEQ ID NO: 8695 - protein, 6 aa, Artificial Sequence
  Description of Artificial Sequence: Synthetic peptide
FYGMDV

SEQ ID NO: 8696 - protein, 6 aa, Artificial Sequence
  Description of Artificial Sequence: Synthetic peptide
HYGMDV

SEQ ID NO: 8697 - protein, 6 aa, Artificial Sequence
  Description of Artificial Sequence: Synthetic peptide
LYGMDV

SEQ ID NO: 8698 - protein, 6 aa, Artificial Sequence
  Description of Artificial Sequence: Synthetic peptide
NYGMDV

SEQ ID NO: 8699 - protein, 6 aa, Artificial Sequence
  Description of Artificial Sequence: Synthetic peptide
LWYFDL

SEQ ID NO: 8700 - protein, 6 aa, Artificial Sequence
  Description of Artificial Sequence: Synthetic peptide
SWYFDL

SEQ ID NO: 8701 - protein, 6 aa, Artificial Sequence
  Description of Artificial Sequence: Synthetic peptide
DYYMDV

SEQ ID NO: 8702 - protein, 6 aa, Artificial Sequence
  Description of Artificial Sequence: Synthetic peptide
AYGMDV

SEQ ID NO: 8703 - protein, 6 aa, Artificial Sequence
  Description of Artificial Sequence: Synthetic peptide
PYGMDV

SEQ ID NO: 8704 - protein, 6 aa, Artificial Sequence
  Description of Artificial Sequence: Synthetic peptide
SYGMDV

SEQ ID NO: 8705 - protein, 6 aa, Artificial Sequence
  Description of Artificial Sequence: Synthetic peptide
IYGMDV

SEQ ID NO: 8706 - protein, 6 aa, Artificial Sequence
  Description of Artificial Sequence: Synthetic peptide
TYGMDV

SEQ ID NO: 8707 - protein, 6 aa, Artificial Sequence
  Description of Artificial Sequence: Synthetic peptide
RYGMDV

SEQ ID NO: 8708 - protein, 6 aa, Artificial Sequence
  Description of Artificial Sequence: Synthetic peptide
GYGMDV

SEQ ID NO: 8709 - protein, 6 aa, Artificial Sequence
  Description of Artificial Sequence: Synthetic peptide
VYGMDV

SEQ ID NO: 8710 - protein, 7 aa, Artificial Sequence
  Description of Artificial Sequence: Synthetic peptide
DYYGMDV

SEQ ID NO: 8711 - protein, 7 aa, Artificial Sequence
  Description of Artificial Sequence: Synthetic peptide
NYYGMDV

SEQ ID NO: 8712 - protein, 7 aa, Artificial Sequence
  Description of Artificial Sequence: Synthetic peptide
LYYGMDV

SEQ ID NO: 8713 - protein, 7 aa, Artificial Sequence
  Description of Artificial Sequence: Synthetic peptide
HYYGMDV

SEQ ID NO: 8714 - protein, 7 aa, Artificial Sequence
  Description of Artificial Sequence: Synthetic peptide
SYYGMDV

SEQ ID NO: 8715 - protein, 7 aa, Artificial Sequence
  Description of Artificial Sequence: Synthetic peptide
PYYGMDV

SEQ ID NO: 8716 - protein, 7 aa, Artificial Sequence
  Description of Artificial Sequence: Synthetic peptide
NYYYMDV

SEQ ID NO: 8717 - protein, 7 aa, Artificial Sequence
  Description of Artificial Sequence: Synthetic peptide
DYYYMDV

SEQ ID NO: 8718 - protein, 4 aa, Artificial Sequence
  Description of Artificial Sequence: Synthetic peptide
ERTI

SEQ ID NO: 8719 - protein, 10 aa, Artificial Sequence
  Description of Artificial Sequence: Synthetic peptide
DRYSGYDLGY

SEQ ID NO: 8720 - protein, 12 aa, Artificial Sequence
  Description of Artificial Sequence: Synthetic peptide
GIAAADSNWFDP

SEQ ID NO: 8721 - protein, 20 aa, Artificial Sequence
  Description of Artificial Sequence: Synthetic peptide
DEHLQVDEHLQVSYSTPFYT

SEQ ID NO: 8722 - protein, 25 aa, Artificial Sequence
  Description of Artificial Sequence: Synthetic peptide
DEHLQVQAEGIKLPQRTVYSTPFYT

SEQ ID NO: 8723 - protein, 23 aa, Artificial Sequence
  Description of Artificial Sequence: Synthetic peptide
DEHLQVQSADFHLPSVYSTPFYT

SEQ ID NO: 8724 - protein, 26 aa, Artificial Sequence
  Description of Artificial Sequence: Synthetic peptide
DEHLQVQSYADFHILNPSTVYTPFYT

SEQ ID NO: 8725 - protein, 23 aa, Artificial Sequence
  Description of Artificial Sequence: Synthetic peptide
DEHLQVQSYSADFHLPSVYPFYT

SEQ ID NO: 8726 - protein, 25 aa, Artificial Sequence
  Description of Artificial Sequence: Synthetic peptide
QDEHLQVAEGIKLPQRTVYSTPFYT

SEQ ID NO: 8727 - protein, 23 aa, Artificial Sequence
  Description of Artificial Sequence: Synthetic peptide
QDEHLQVSADFHLPSVYSTPFYT

SEQ ID NO: 8728 - protein, 26 aa, Artificial Sequence
  Description of Artificial Sequence: Synthetic peptide
QDEHLQVSYADFHILNPSTVYTPFYT

SEQ ID NO: 8729 - protein, 23 aa, Artificial Sequence
  Description of Artificial Sequence: Synthetic peptide
QDEHLQVSYSADFHLPSVYPFYT

SEQ ID NO: 8730 - protein, 28 aa, Artificial Sequence
  Description of Artificial Sequence: Synthetic peptide
QQAEGIKLPQRTVADFHLPSVYSTPFYT

SEQ ID NO: 8731 - protein, 31 aa, Artificial Sequence
  Description of Artificial Sequence: Synthetic polypeptide
QQAEGIKLPQRTVYADFHILNPSTVYTPFYT

SEQ ID NO: 8732 - protein, 28 aa, Artificial Sequence
  Description of Artificial Sequence: Synthetic peptide
QQAEGIKLPQRTVYSADFHLPSVYPFYT

SEQ ID NO: 8733 - protein, 29 aa, Artificial Sequence
  Description of Artificial Sequence: Synthetic peptide
QQSADFHLPSVYADFHILNPSTVYTPFYT

SEQ ID NO: 8734 - protein, 26 aa, Artificial Sequence
  Description of Artificial Sequence: Synthetic peptide
QQSADFHLPSVYSADFHLPSVYPFYT

SEQ ID NO: 8735 - protein, 29 aa, Artificial Sequence
  Description of Artificial Sequence: Synthetic peptide
QQSYADFHILNPSTVYADFHLPSVYPFYT

SEQ ID NO: 8736 - protein, 28 aa, Artificial Sequence
  Description of Artificial Sequence: Synthetic peptide
QQAEGIKLPQRTVADFHLPSVYSTPFYT

SEQ ID NO: 8737 - protein, 31 aa, Artificial Sequence; identical to SEQ ID NO: 8731
  Description of Artificial Sequence: Synthetic polypeptide

SEQ ID NO: 8738 - protein, 28 aa, Artificial Sequence
  Description of Artificial Sequence: Synthetic peptide
QQAEGIKLPQRTVYSADFHLPSVYPFYT

SEQ ID NO: 8739 - protein, 29 aa, Artificial Sequence
  Description of Artificial Sequence: Synthetic peptide
QQSADFHLPSVYADFHILNPSTVYTPFYT

SEQ ID NO: 8740 - protein, 26 aa, Artificial Sequence
  Description of Artificial Sequence: Synthetic peptide
QQSADFHLPSVYSADFHLPSVYPFYT

SEQ ID NO: 8741 - protein, 29 aa, Artificial Sequence
  Description of Artificial Sequence: Synthetic peptide
QQSYADFHILNPSTVYADFHLPSVYPFYT

SEQ ID NO: 8742 - protein, 39 aa, Artificial Sequence
  Description of Artificial Sequence: Synthetic polypeptide
QQAEGIKLPQRTVADFHLPSVYADFHILNPSTVYTPFYT

SEQ ID NO: 8743 - protein, 36 aa, Artificial Sequence
  Description of Artificial Sequence: Synthetic polypeptide
QQAEGIKLPQRTVADFHLPSVYSADFHLPSVYPFYT

SEQ ID NO: 8744 - protein, 39 aa, Artificial Sequence
  Description of Artificial Sequence: Synthetic polypeptide
QQAEGIKLPQRTVYADFHILNPSTVYADFHLPSVYPFYT

SEQ ID NO: 8745 - protein, 37 aa, Artificial Sequence
  Description of Artificial Sequence: Synthetic polypeptide
QQSADFHLPSVYADFHILNPSTVYADFHLPSVYPFYT

SEQ ID NO: 8746 - protein, 5 aa, Artificial Sequence
  Description of Artificial Sequence: Synthetic peptide
LVIIT

SEQ ID NO: 8747 - protein, 5 aa, Artificial Sequence
  Description of Artificial Sequence: Synthetic peptide
WCMLY

SEQ ID NO: 8748 - DNA, 15 bp, Artificial Sequence
  Description of Artificial Sequence: Synthetic oligonucleotide
atgcttttgatatct

SEQ ID NO: 8749 - DNA, 16 bp, Artificial Sequence
  Description of Artificial Sequence: Synthetic oligonucleotide
  modified_base (1)..(2): a, c, t or g
nntgcttttgatatct

SEQ ID NO: 8750 - DNA, 13 bp, Artificial Sequence
  Description of Artificial Sequence: Synthetic oligonucleotide
gcttttgatatct

SEQ ID NO: 8751 - DNA, 13 bp, Artificial Sequence
  Description of Artificial Sequence: Synthetic oligonucleotide
  modified_base (1)..(2): a, c, t or g
nnttttgatatct

SEQ ID NO: 8752 - DNA, 15 bp, Artificial Sequence
  Description of Artificial Sequence: Synthetic oligonucleotide
gctgaatacttccag

SEQ ID NO: 8753 - DNA, 15 bp, Artificial Sequence
  Description of Artificial Sequence: Synthetic oligonucleotide
  modified_base (1)..(2): a, c, t or g
nntgaatacttccag

SEQ ID NO: 8754 - DNA, 12 bp, Artificial Sequence
  Description of Artificial Sequence: Synthetic oligonucleotide
gaatacttccag

SEQ ID NO: 8755 - DNA, 12 bp, Artificial Sequence
  Description of Artificial Sequence: Synthetic oligonucleotide
  modified_base (1)..(2): a, c, t or g
nnatacttccag

SEQ ID NO: 8756 - DNA, 15 bp, Artificial Sequence
  Description of Artificial Sequence: Synthetic oligonucleotide
ctactggtacttcga

SEQ ID NO: 8757 - DNA, 15 bp, Artificial Sequence
  Description of Artificial Sequence: Synthetic oligonucleotide
  modified_base (1)..(2): a, c, t or g
nnactggtacttcga

SEQ ID NO: 8758 - DNA, 12 bp, Artificial Sequence
  Description of Artificial Sequence: Synthetic oligonucleotide
ctggtacttcga

SEQ ID NO: 8759 - DNA, 12 bp, Artificial Sequence
  Description of Artificial Sequence: Synthetic oligonucleotide
  modified_base (1)..(2): a, c, t or g
nnggtacttcga

SEQ ID NO: 8760 - protein, 16 aa, Artificial Sequence
  Description of Artificial Sequence: Synthetic peptide
ERTINWGWGGVYAFDI

SEQ ID NO: 8761 - protein, 15 aa, Artificial Sequence
  Description of Artificial Sequence: Synthetic peptide
ERTINWGWGWYAFDI

What is claimed is:

1. A library of synthetic polynucleotides comprising at least about 10⁴ polynucleotides encoding polypeptides comprising CDRH3 sequences with the structure:
[TN1]-[DH]-[N2]-[H3-JH], wherein:
TN1 is a polypeptide corresponding to any of the TN1 polypeptides of Tables 9-10 and 18-26, or a polypeptide produced by translation of any of the TN1 polynucleotides of Tables 25-26;
DH is a polypeptide corresponding to any of the DH polypeptides of Tables 9, 11, 17-25 and 28, or a polypeptide produced by translation of any of the DH-encoding polynucleotides of Tables 16, 25 and 27;
N2 is a polypeptide corresponding to any of the N2 polypeptides of Tables 9, 12, 18-25 and 30, or a polypeptide produced by translation of any of the N2-encoding polynucleotides of Tables 25 and 29; and
H3-JH is a polypeptide corresponding to any of the H3-JH polypeptides of Tables 9, 13, 15, 18-25 and 32, or a polypeptide produced by translation of any of the H3-JH-encoding polynucleotides of Tables 14, 25 and 31.

2. The library of claim 1, wherein at least about 1%, 5%, or 10% of the sequences in the library have the provided structure.

3. The library of claim 1, wherein the polynucleotides encode CDRH3 polypeptides produced by the sets of TN1, DH, N2, and H3-JH polypeptides provided in any one of Tables 23-25.

4. The library of claim 1, wherein the polynucleotides encode CDRH3 polypeptides produced by the set of TN1 polypeptides provided in Table 26, the set of DH polypeptides provided in Table 28, the set of N2 polypeptides provided in Table 30 and the set of H3-JH polypeptides provided in Table 32.

5. A method of using the library of claim 1 to isolate an antibody binding an antigen, comprising contacting the polypeptide expression products of said library with an antigen and isolating polypeptide expression products that bind to the antigen.

6. The library of claim 1 wherein number of N-linked glycosylation sites, deamidation motifs, and/or Cys residues are reduced or eliminated in comparison to libraries produced by amplification of a repertoire from a biological source.

7. The library of claim 1, further comprising a polynucleotide encoding one or more light chain variable domain polypeptides.

8. The library of claim 7, wherein the polypeptides are expressed as full-length IgGs.

9. The polypeptide expression products of the library of claim 8.

10. An antibody isolated from the polypeptide expression products of claim 9.

11. A vector containing the library of claim 1.

12. A host cell containing the vector of claim 11.

13. The host cell of claim 12, wherein the host cell is a yeast cell.

14. The yeast cell of claim 13, wherein the yeast is Saccharomyces cerevisiae.

15. A kit containing the library of claim 1.

16. A representation of the library of claim 1 in a computer readable format.

17. A library of synthetic polynucleotides comprising at least about 10⁴ polynucleotides encoding polypeptides comprising CDRH3 sequences with the structure:
[TN1]-[DH]-[N2]-[H3-JH], wherein:
TN1 is a polypeptide at least about 80%, 90%, or 95% identical to any of the TN1 polypeptides of Tables 9-10 and 18-26, or a polypeptide at least about 80%, 90%, or 95% identical to a polypeptide produced by translation of any of the TN1 polynucleotides of Tables 25-26;
DH is a polypeptide at least about 80%, 90%, or 95% identical to any of the DH polypeptides of Tables 9, 11, 17-25 and 28, or a polypeptide at least about 80%, 90%, or 95% identical to a polypeptide produced by translation of any of the DH-encoding polynucleotides of Tables 16, 25 and 27;
N2 is a polypeptide at least about 80%, 90%, or 95% identical to any of the N2 polypeptides of Tables 9, 12, 18-25 and 30, or a polypeptide at least about 80%, 90%, or 95% identical to a polypeptide produced by translation of any of the N2-encoding polynucleotides of Tables 25 and 29; and
H3-JH is a polypeptide at least about 80%, 90%, or 95% identical to any of the H3-JH polypeptides of Tables 9, 13, 15, 18-25 and 32, or a polypeptide at least about 80%, 90%, or 95% identical to a polypeptide produced by translation of any of the H3-JH-encoding polynucleotides of Tables 14, 25 and 31.

18. A library of synthetic polynucleotides encoding light chain variable regions, wherein the light chain variable regions are selected from the group consisting of:
(a) a VK1-05 sequence varied at one or more of positions 4, 49, and 46;
(b) a VK1-12 sequence varied at one or more of positions 4, 49, 46, and 66;
(c) a VK1-33 sequence varied at one or more of positions 4, 49, and 66;
(d) a VK1-39 sequence varied at one or more of positions 4, 49, and 46;
(e) a VK2-28 sequence varied at one or more of positions 2, 4, 46, and 49;
(f) a VK3-11 sequence varied at one or more of positions 2, 4, 36, and 49;
(g) a VK3-15 sequence varied at one or more of positions 2, 4, 48, and 49;
(h) a VK3-20 sequence varied at one or more of positions 2, 4, 48, and 49; and
(i) a VK4-1 sequence varied at one or more of positions 4, 46, 49, and 66.

19. The library of claim 18, wherein the library comprises polynucleotides encoding light chain variable regions that comprise polypeptide sequences at least about 80%, 90%, or 95% identical to two or more of the light chain polypeptide sequences provided in Table 3.

20. The library of claim 18, wherein the light chain variable regions comprise the polypeptide sequences provided in Table 3.

21. A library of synthetic polynucleotides encoding light chain variable regions, wherein the polypeptide sequences of the light chain variable regions are varied at two or three residues between positions 89 to 94, inclusive, of the variable light chain polypeptide sequence.

22. The library of claim 21, wherein the library comprises polynucleotides encoding light chain variable regions comprising polypeptide sequences at least about 80%, 90%, or 95% identical to polypeptides produced by translation of two or more of the polynucleotide sequences provided in Tables 5-7.

23. The library of claim 21, wherein the light chain variable regions comprise the polypeptides produced by translation of the polynucleotide sequences provided in Tables 5-7.

24. A representation of any of the following, in a computer readable format:
the TN1 polypeptides of Tables 10, 23-25 and 26;
the DH polypeptides of Tables 11, 23-25 and 28;
the N2 polypeptides of Tables 12, 23-25 and 30;
the H3-JH polypeptides of Tables 13, 15, 17, 23-25 and 32;
the TN1 polynucleotides of Tables 25-26;
the DH polynucleotides of Tables 25 and 27;
the N2 polynucleotides of Tables 25 and 29; and
the H3-JH polynucleotides of Tables 25 and 31.

25. A representation of the polynucleotide sequences of the Human Preimmune Set (Appendix A), or the polypeptide expression products thereof, in a computer readable format.

26. A method of making a library of synthetic polynucleotides encoding polypeptides comprising CDRH3 sequences, the method comprising:
(a) providing a theoretical segment pool containing TN1, DH, N2, and H3-JH segments;
(b) providing a reference set of CDRH3 sequences;
(c) utilizing the theoretical segment pool of (a) to identify the closest match(es) to each CDRH3 sequence in the reference set of (b);
(d) selecting segments from the theoretical segment pool for inclusion in a synthetic library; and
(e) synthesizing the synthetic CDRH3 library.

27. A library of polynucleotides made according to the method of claim 26.

28. The method of claim 26, wherein the segments selected for inclusion in the synthetic library are selected according to their segment usage weight in the reference set of CDRH3 sequences.

29. The method of claim 26, wherein the segments selected for inclusion in the synthetic library are selected according to one or more physicochemical properties.

30. The method of claim 26, wherein the reference set of CDRH3 sequences is a reference set of preimmune CDRH3 sequences.

31. The method of claim 26, further comprising selecting additional TN1 and N2 segments occurring in the reference set but not in the theoretical segment pool.

32. The method of claim 26, wherein stop codons are reduced or eliminated from the library.

33. The method of claim 26, wherein the unpaired Cys residues, N-linked glycosylation motifs, and deamidation motifs are reduced or eliminated in the translation products of the library.

34. The method of claim 26, wherein the DH segments and H3-JH segments are progressively truncated prior to matching with the CDRH3 sequences in the reference set.

35. The method of claim 26, further comprising introducing one or two degenerate codons in a segment selected from the group consisting of DH and N2, or combinations thereof.

36. The method of claim 26, further comprising introducing one degenerate codon in the H3-JH segment.

37. The polypeptide expression products of the library of claim 26.

38. An antibody isolated from the polypeptide expression products of claim 37.

39. A method of making synthetic polynucleotides encoding a CDRL3 library, comprising:
(i) obtaining a reference set of light chain sequences, wherein the reference set contains light chain sequences with VL segments originating from the same IGVL germline gene and/or its allelic variants;
(ii) determining which amino acids occur at each of the CDRL3 positions in the reference set that are encoded by the IGVL gene;
(iii) synthesizing light chain variable domain encoding sequences wherein two or three positions between positions 89 and 94, inclusive, contain degenerate codons encoding two or more of the five most frequently occurring amino acid residues at the corresponding positions in the reference set; and
(iv) synthesizing the polynucleotides encoding the CDRL3 library.

40. A library of polynucleotides made according to the method of claim 39.

41. A library of synthetic polynucleotides encoding polypeptides comprising:
one or more VH chassis comprising Kabat residues 1 to 94 of a human IGHV sequence;
one or more TN1 segments selected from a reference set of human CDRH3 sequences;
one or more DH segments selected from a theoretical segment pool that has been matched to a reference set of human CDRH3 sequences;
one or more N2 segments selected from a reference set of human CDRH3 sequences; and
one or more H3-JH segments selected from a theoretical segment pool that has been matched to a reference set of human CDRH3 sequences.
